United States Patent Application Publication US 2025/0235526 A1 - sequence listing, part 2

SEQ ID NO: 6199 - protein, 14 aa, synthetic construct
  source 1..14: note = Seed: PPFLWMGYELHPDK; note = HLAs: DPA10103-DPB10101 DPA10103-DPB10201 DPA10103-DPB10202 DPA10103-DPB10401 DPA10103-DPB112601 DPA10103-DPB11501 DPA10103-DPB11601 DPA10103-DPB11901 DPA10103-DPB12301 DPA10103-DPB13101 DPA10103-DPB13401 DPA10103-DPB13901 DPA10103-DPB14001 DPA10103-DPB14101 DPA10103-DPB14801 DPA10103-DPB15001 DPA10103-DPB15901 DPA10104-DPB10101 DPA10104-DPB11501 DPA10105-DPB10101 DPA10105-DPB10401 DPA10105-DPB15001 DPA10106-DPB10101 DPA10201-DPB10101 DPA10201-DPB110601 DPA10201-DPB11501 DPA10201-DPB11601 DPA10201-DPB11901 DPA10202-DPB10101 DPA10202-DPB10201 DPA10202-DPB10202 DPA10202-DPB10401 DPA10202-DPB110601 DPA10202-DPB11901 DPA10202-DPB13101 DPA10202-DPB16501 DPA10301-DPB10101 DPA10301-DPB10201 DPA10301-DPB10202 DPA10301-DPB10401 DPA10301-DPB10402 DPA10301-DPB110501 DPA10301-DPB110601 DPA10301-DPB11801 DPA10301-DPB12301 DPA10301-DPB13901 DPA10301-DPB14001 DPA10301-DPB14901 DPA10301-DPB15501 DPA10301-DPB16501 DPA10301-DPB17501 DPA10301-DPB18001 DPA10401-DPB10101 DPA10401-DPB10201; note = HLAs: DPA10401-DPB10202 DPA10401-DPB10402 DPA10401-DPB10501 DPA10401-DPB110501 DPA10401-DPB14901
PPFLWEGFELLPDK

SEQ ID NO: 6200 - protein, 14 aa, synthetic construct
  source 1..14: note = Seed: PPFLWMGYELHPDK; note = HLAs: DPA10103-DPB10101 DPA10103-DPB10201 DPA10103-DPB10202 DPA10103-DPB10401 DPA10103-DPB112601 DPA10103-DPB11501 DPA10103-DPB11601 DPA10103-DPB11901 DPA10103-DPB12301 DPA10103-DPB13101 DPA10103-DPB13401 DPA10103-DPB13901 DPA10103-DPB14001 DPA10103-DPB14101 DPA10103-DPB14801 DPA10103-DPB15001 DPA10103-DPB15901 DPA10104-DPB10101 DPA10104-DPB11501 DPA10105-DPB10101 DPA10105-DPB10401 DPA10105-DPB15001 DPA10106-DPB10101 DPA10201-DPB10101 DPA10201-DPB110601 DPA10201-DPB11501 DPA10201-DPB11601 DPA10201-DPB11901 DPA10202-DPB10101 DPA10202-DPB10201 DPA10202-DPB10202 DPA10202-DPB10401 DPA10202-DPB110601 DPA10202-DPB11901 DPA10202-DPB13101 DPA10202-DPB16501 DPA10301-DPB10101 DPA10301-DPB10201 DPA10301-DPB10202 DPA10301-DPB10401 DPA10301-DPB10402 DPA10301-DPB110501 DPA10301-DPB110601 DPA10301-DPB11801 DPA10301-DPB12301 DPA10301-DPB13901 DPA10301-DPB14001 DPA10301-DPB14901 DPA10301-DPB15501 DPA10301-DPB16501 DPA10301-DPB17501 DPA10301-DPB18001 DPA10401-DPB10101 DPA10401-DPB10201; note = HLAs: DPA10401-DPB10202 DPA10401-DPB10402 DPA10401-DPB10501 DPA10401-DPB110501 DPA10401-DPB14901
PPFLWSGFELFPDK

SEQ ID NO: 6201 - protein, 20 aa, synthetic construct
  source 1..20: note = Seed: KEPPFLWMGYELHPDKWTVQ; note = HLAs: DPA10103-DPB10101 DPA10103-DPB10201 DPA10103-DPB10202 DPA10103-DPB10401 DPA10103-DPB10402 DPA10103-DPB10501 DPA10103-DPB110501 DPA10103-DPB112601 DPA10103-DPB11501 DPA10103-DPB11601 DPA10103-DPB11801 DPA10103-DPB11901 DPA10103-DPB12301 DPA10103-DPB13101 DPA10103-DPB13401 DPA10103-DPB13901 DPA10103-DPB14001 DPA10103-DPB14101 DPA10103-DPB14801 DPA10103-DPB14901 DPA10103-DPB15001 DPA10103-DPB15101 DPA10103-DPB15501 DPA10103-DPB15901 DPA10103-DPB18001 DPA10104-DPB10101 DPA10104-DPB11501 DPA10105-DPB10101 DPA10105-DPB10401 DPA10105-DPB11801 DPA10105-DPB15001 DPA10106-DPB10101 DPA10201-DPB10101 DPA10201-DPB10201 DPA10201-DPB10202 DPA10201-DPB10401 DPA10201-DPB10501 DPA10201-DPB110601 DPA10201-DPB11501 DPA10201-DPB11601 DPA10201-DPB11901 DPA10201-DPB13401 DPA10201-DPB15501 DPA10202-DPB10101 DPA10202-DPB10201 DPA10202-DPB10202 DPA10202-DPB10401 DPA10202-DPB10501 DPA10202-DPB110601 DPA10202-DPB11101 DPA10202-DPB11301 DPA10202-DPB11801 DPA10202-DPB11901 DPA10202-DPB13101 DPA10202-DPB13801; note = HLAs: DPA10202-DPB15501 DPA10202-DPB16501 DPA10301-DPB10101 DPA10301-DPB10201 DPA10301-DPB10202 DPA10301-DPB10401 DPA10301-DPB10402 DPA10301-DPB110501 DPA10301-DPB110601 DPA10301-DPB11101 DPA10301-DPB11301 DPA10301-DPB11801 DPA10301-DPB12301 DPA10301-DPB13901 DPA10301-DPB14001 DPA10301-DPB14901 DPA10301-DPB15501 DPA10301-DPB16501 DPA10301-DPB17501 DPA10301-DPB18001 DPA10401-DPB10101 DPA10401-DPB10201 DPA10401-DPB10202 DPA10401-DPB10402 DPA10401-DPB10501 DPA10401-DPB110501 DPA10401-DPB14901
KEPPFLWTGFELMPDKWTVQ

SEQ ID NO: 6202 - protein, 14 aa, synthetic construct
  source 1..14: note = Seed: PPFLWMGYELHPDK; note = HLAs: DRB1_1001 DPA10103-DPB10101 DPA10103-DPB10201 DPA10103-DPB10202 DPA10103-DPB10401 DPA10103-DPB112601 DPA10103-DPB11501 DPA10103-DPB11601 DPA10103-DPB11901 DPA10103-DPB12301 DPA10103-DPB13101 DPA10103-DPB13401 DPA10103-DPB13901 DPA10103-DPB14001 DPA10103-DPB14101 DPA10103-DPB14801 DPA10103-DPB15001 DPA10103-DPB15901 DPA10104-DPB10101 DPA10104-DPB11501 DPA10105-DPB10101 DPA10105-DPB10401 DPA10105-DPB15001 DPA10106-DPB10101 DPA10201-DPB10101 DPA10201-DPB110601 DPA10201-DPB11501 DPA10201-DPB11601 DPA10201-DPB11901 DPA10202-DPB10101 DPA10202-DPB10201 DPA10202-DPB10202 DPA10202-DPB10401 DPA10202-DPB110601 DPA10202-DPB11901 DPA10202-DPB13101 DPA10202-DPB16501 DPA10301-DPB10101 DPA10301-DPB10201 DPA10301-DPB10202 DPA10301-DPB10401 DPA10301-DPB10402 DPA10301-DPB110501 DPA10301-DPB110601 DPA10301-DPB11801 DPA10301-DPB12301 DPA10301-DPB13901 DPA10301-DPB14001 DPA10301-DPB14901 DPA10301-DPB15501 DPA10301-DPB16501 DPA10301-DPB17501 DPA10301-DPB18001 DPA10401-DPB10101 DPA10401-DPB10201; note = HLAs: DPA10401-DPB10202 DPA10401-DPB10402 DPA10401-DPB10501 DPA10401-DPB110501 DPA10401-DPB14901
PPFLWEGFELVPDK

SEQ ID NO: 6203 - protein, 14 aa, synthetic construct
  source 1..14: note = Seed: PPFLWMGYELHPDK; note = HLAs: DPA10103-DPB10101 DPA10103-DPB10201 DPA10103-DPB10202 DPA10103-DPB10401 DPA10103-DPB112601 DPA10103-DPB11501 DPA10103-DPB11601 DPA10103-DPB11901 DPA10103-DPB12301 DPA10103-DPB13101 DPA10103-DPB13401 DPA10103-DPB13901 DPA10103-DPB14001 DPA10103-DPB14101 DPA10103-DPB14801 DPA10103-DPB15001 DPA10103-DPB15901 DPA10104-DPB10101 DPA10104-DPB11501 DPA10105-DPB10101 DPA10105-DPB10401 DPA10105-DPB15001 DPA10106-DPB10101 DPA10201-DPB10101 DPA10201-DPB110601 DPA10201-DPB11501 DPA10201-DPB11601 DPA10201-DPB11901 DPA10202-DPB10101 DPA10202-DPB10201 DPA10202-DPB10202 DPA10202-DPB10401 DPA10202-DPB110601 DPA10202-DPB11901 DPA10202-DPB13101 DPA10202-DPB16501 DPA10301-DPB10101 DPA10301-DPB10201 DPA10301-DPB10202 DPA10301-DPB10401 DPA10301-DPB10402 DPA10301-DPB110501 DPA10301-DPB110601 DPA10301-DPB11801 DPA10301-DPB12301 DPA10301-DPB13901 DPA10301-DPB14001 DPA10301-DPB14901 DPA10301-DPB15501 DPA10301-DPB16501 DPA10301-DPB17501 DPA10301-DPB18001 DPA10401-DPB10101 DPA10401-DPB10201; note = HLAs: DPA10401-DPB10202 DPA10401-DPB10402 DPA10401-DPB10501 DPA10401-DPB110501 DPA10401-DPB14901
PPFLWTGFELFPDK

SEQ ID NO: 6204 - protein, 20 aa, synthetic construct
  source 1..20: note = Seed: KEPPFLWMGYELHPDKWTVQ; note = HLAs: DPA10103-DPB10101 DPA10103-DPB10201 DPA10103-DPB10202 DPA10103-DPB10401 DPA10103-DPB10402 DPA10103-DPB10501 DPA10103-DPB110501 DPA10103-DPB112601 DPA10103-DPB11501 DPA10103-DPB11601 DPA10103-DPB11801 DPA10103-DPB11901 DPA10103-DPB12301 DPA10103-DPB13101 DPA10103-DPB13401 DPA10103-DPB13901 DPA10103-DPB14001 DPA10103-DPB14101 DPA10103-DPB14801 DPA10103-DPB14901 DPA10103-DPB15001 DPA10103-DPB15101 DPA10103-DPB15501 DPA10103-DPB15901 DPA10103-DPB18001 DPA10104-DPB10101 DPA10104-DPB11501 DPA10105-DPB10101 DPA10105-DPB10401 DPA10105-DPB11801 DPA10105-DPB15001 DPA10106-DPB10101 DPA10201-DPB10101 DPA10201-DPB10201 DPA10201-DPB10202 DPA10201-DPB10401 DPA10201-DPB10501 DPA10201-DPB110601 DPA10201-DPB11501 DPA10201-DPB11601 DPA10201-DPB11901 DPA10201-DPB13401 DPA10201-DPB15501 DPA10202-DPB10101 DPA10202-DPB10201 DPA10202-DPB10202 DPA10202-DPB10401 DPA10202-DPB10501 DPA10202-DPB110601 DPA10202-DPB11101 DPA10202-DPB11301 DPA10202-DPB11801 DPA10202-DPB11901 DPA10202-DPB13101 DPA10202-DPB13801; note = HLAs: DPA10202-DPB15501 DPA10202-DPB16501 DPA10301-DPB10101 DPA10301-DPB10201 DPA10301-DPB10202 DPA10301-DPB10401 DPA10301-DPB10402 DPA10301-DPB110501 DPA10301-DPB110601 DPA10301-DPB11101 DPA10301-DPB11301 DPA10301-DPB11801 DPA10301-DPB12301 DPA10301-DPB13901 DPA10301-DPB14001 DPA10301-DPB14901 DPA10301-DPB15501 DPA10301-DPB16501 DPA10301-DPB17501 DPA10301-DPB18001 DPA10401-DPB10101 DPA10401-DPB10201 DPA10401-DPB10202 DPA10401-DPB10402 DPA10401-DPB10501 DPA10401-DPB110501 DPA10401-DPB14901
KEPPFLWHGFELIPDKWTVQ

SEQ ID NO: 6205 - protein, 14 aa, synthetic construct
  source 1..14: note = Seed: PPFLWMGYELHPDK; note = HLAs: DRB1_1001 DPA10103-DPB10101 DPA10103-DPB10201 DPA10103-DPB10202 DPA10103-DPB10401 DPA10103-DPB112601 DPA10103-DPB11501 DPA10103-DPB11601 DPA10103-DPB11901 DPA10103-DPB12301 DPA10103-DPB13101 DPA10103-DPB13401 DPA10103-DPB13901 DPA10103-DPB14001 DPA10103-DPB14101 DPA10103-DPB14801 DPA10103-DPB15001 DPA10103-DPB15901 DPA10104-DPB10101 DPA10104-DPB11501 DPA10105-DPB10101 DPA10105-DPB10401 DPA10105-DPB15001 DPA10106-DPB10101 DPA10201-DPB10101 DPA10201-DPB110601 DPA10201-DPB11501 DPA10201-DPB11601 DPA10201-DPB11901 DPA10202-DPB10101 DPA10202-DPB10201 DPA10202-DPB10202 DPA10202-DPB10401 DPA10202-DPB110601 DPA10202-DPB11901 DPA10202-DPB13101 DPA10202-DPB16501 DPA10301-DPB10101 DPA10301-DPB10201 DPA10301-DPB10202 DPA10301-DPB10401 DPA10301-DPB10402 DPA10301-DPB110501 DPA10301-DPB110601 DPA10301-DPB11801 DPA10301-DPB12301 DPA10301-DPB13901 DPA10301-DPB14001 DPA10301-DPB14901 DPA10301-DPB15501 DPA10301-DPB16501 DPA10301-DPB17501 DPA10301-DPB18001 DPA10401-DPB10101 DPA10401-DPB10201; note = HLAs: DPA10401-DPB10202 DPA10401-DPB10402 DPA10401-DPB10501 DPA10401-DPB110501 DPA10401-DPB14901
PPFLWQGFELLPDK

SEQ ID NO: 6206 - protein, 14 aa, synthetic construct
  source 1..14: note = Seed: PPFLWMGYELHPDK; note = HLAs: DRB1_1001 DPA10103-DPB10101 DPA10103-DPB10201 DPA10103-DPB10202 DPA10103-DPB10401 DPA10103-DPB112601 DPA10103-DPB11501 DPA10103-DPB11601 DPA10103-DPB11901 DPA10103-DPB12301 DPA10103-DPB13101 DPA10103-DPB13401 DPA10103-DPB13901 DPA10103-DPB14001 DPA10103-DPB14101 DPA10103-DPB14801 DPA10103-DPB15001 DPA10103-DPB15901 DPA10104-DPB10101 DPA10104-DPB11501 DPA10105-DPB10101 DPA10105-DPB10401 DPA10105-DPB15001 DPA10106-DPB10101 DPA10201-DPB10101 DPA10201-DPB110601 DPA10201-DPB11501 DPA10201-DPB11601 DPA10201-DPB11901 DPA10202-DPB10101 DPA10202-DPB10201 DPA10202-DPB10202 DPA10202-DPB10401 DPA10202-DPB110601 DPA10202-DPB11901 DPA10202-DPB13101 DPA10202-DPB16501 DPA10301-DPB10101 DPA10301-DPB10201 DPA10301-DPB10202 DPA10301-DPB10401 DPA10301-DPB10402 DPA10301-DPB110501 DPA10301-DPB110601 DPA10301-DPB11801 DPA10301-DPB12301 DPA10301-DPB13901 DPA10301-DPB14001 DPA10301-DPB14901 DPA10301-DPB15501 DPA10301-DPB16501 DPA10301-DPB17501 DPA10301-DPB18001 DPA10401-DPB10101 DPA10401-DPB10201; note = HLAs: DPA10401-DPB10202 DPA10401-DPB10402 DPA10401-DPB10501 DPA10401-DPB110501 DPA10401-DPB14901
PPFLWTGFELAPDK

SEQ ID NO: 6207 - protein, 20 aa, synthetic construct
  source 1..20: note = Seed: KEPPFLWMGYELHPDKWTVQ; note = HLAs: DRB1_0101 DPA10103-DPB10101 DPA10103-DPB10201 DPA10103-DPB10202 DPA10103-DPB10401 DPA10103-DPB10402 DPA10103-DPB10501 DPA10103-DPB110501 DPA10103-DPB112601 DPA10103-DPB11501 DPA10103-DPB11601 DPA10103-DPB11801 DPA10103-DPB11901 DPA10103-DPB12301 DPA10103-DPB13101 DPA10103-DPB13401 DPA10103-DPB13901 DPA10103-DPB14001 DPA10103-DPB14101 DPA10103-DPB14801 DPA10103-DPB14901 DPA10103-DPB15001 DPA10103-DPB15101 DPA10103-DPB15501 DPA10103-DPB15901 DPA10103-DPB18001 DPA10104-DPB10101 DPA10104-DPB11501 DPA10105-DPB10101 DPA10105-DPB10401 DPA10105-DPB11801 DPA10105-DPB15001 DPA10106-DPB10101 DPA10201-DPB10101 DPA10201-DPB10201 DPA10201-DPB10202 DPA10201-DPB10401 DPA10201-DPB10501 DPA10201-DPB110601 DPA10201-DPB11501 DPA10201-DPB11601 DPA10201-DPB11901 DPA10201-DPB13401 DPA10201-DPB15501 DPA10202-DPB10101 DPA10202-DPB10201 DPA10202-DPB10202 DPA10202-DPB10401 DPA10202-DPB10501 DPA10202-DPB110601 DPA10202-DPB11101 DPA10202-DPB11301 DPA10202-DPB11801 DPA10202-DPB11901 DPA10202-DPB13101; note = HLAs: DPA10202-DPB13801 DPA10202-DPB15501 DPA10202-DPB16501 DPA10301-DPB10101 DPA10301-DPB10201 DPA10301-DPB10202 DPA10301-DPB10401 DPA10301-DPB10402 DPA10301-DPB110501 DPA10301-DPB110601 DPA10301-DPB11101 DPA10301-DPB11301 DPA10301-DPB11801 DPA10301-DPB12301 DPA10301-DPB13901 DPA10301-DPB14001 DPA10301-DPB14901 DPA10301-DPB15501 DPA10301-DPB16501 DPA10301-DPB17501 DPA10301-DPB18001 DPA10401-DPB10101 DPA10401-DPB10201 DPA10401-DPB10202 DPA10401-DPB10402 DPA10401-DPB10501 DPA10401-DPB110501 DPA10401-DPB14901
KEPPFLWEGFELVPDKWTVQ

SEQ ID NO: 6208 - protein, 14 aa, synthetic construct
  source 1..14: note = Seed: PPFLWMGYELHPDK; note = HLAs: DRB1_1001 DPA10103-DPB10101 DPA10103-DPB10201 DPA10103-DPB10202 DPA10103-DPB10401 DPA10103-DPB112601 DPA10103-DPB11501 DPA10103-DPB11601 DPA10103-DPB11901 DPA10103-DPB12301 DPA10103-DPB13101 DPA10103-DPB13401 DPA10103-DPB13901 DPA10103-DPB14001 DPA10103-DPB14101 DPA10103-DPB14801 DPA10103-DPB15001 DPA10103-DPB15901 DPA10104-DPB10101 DPA10104-DPB11501 DPA10105-DPB10101 DPA10105-DPB10401 DPA10105-DPB15001 DPA10106-DPB10101 DPA10201-DPB10101 DPA10201-DPB110601 DPA10201-DPB11501 DPA10201-DPB11601 DPA10201-DPB11901 DPA10202-DPB10101 DPA10202-DPB10201 DPA10202-DPB10202 DPA10202-DPB10401 DPA10202-DPB110601 DPA10202-DPB11901 DPA10202-DPB13101 DPA10202-DPB16501 DPA10301-DPB10101 DPA10301-DPB10201 DPA10301-DPB10202 DPA10301-DPB10401 DPA10301-DPB10402 DPA10301-DPB110501 DPA10301-DPB110601 DPA10301-DPB11801 DPA10301-DPB12301 DPA10301-DPB13901 DPA10301-DPB14001 DPA10301-DPB14901 DPA10301-DPB15501 DPA10301-DPB16501 DPA10301-DPB17501 DPA10301-DPB18001 DPA10401-DPB10101 DPA10401-DPB10201; note = HLAs: DPA10401-DPB10202 DPA10401-DPB10402 DPA10401-DPB10501 DPA10401-DPB110501 DPA10401-DPB14901
PPFLWQGFELIPDK

SEQ ID NO: 6209 - protein, 14 aa, synthetic construct
  source 1..14: note = Seed: PPFLWMGYELHPDK; note = HLAs: DRB1_1001 DPA10103-DPB10101 DPA10103-DPB10201 DPA10103-DPB10202 DPA10103-DPB10401 DPA10103-DPB112601 DPA10103-DPB11501 DPA10103-DPB11601 DPA10103-DPB11901 DPA10103-DPB12301 DPA10103-DPB13101 DPA10103-DPB13401 DPA10103-DPB13901 DPA10103-DPB14001 DPA10103-DPB14101 DPA10103-DPB14801 DPA10103-DPB15001 DPA10103-DPB15901 DPA10104-DPB10101 DPA10104-DPB11501 DPA10105-DPB10101 DPA10105-DPB10401 DPA10105-DPB15001 DPA10106-DPB10101 DPA10201-DPB10101 DPA10201-DPB110601 DPA10201-DPB11501 DPA10201-DPB11601 DPA10201-DPB11901 DPA10202-DPB10101 DPA10202-DPB10201 DPA10202-DPB10202 DPA10202-DPB10401 DPA10202-DPB110601 DPA10202-DPB11901 DPA10202-DPB13101 DPA10202-DPB16501 DPA10301-DPB10101 DPA10301-DPB10201 DPA10301-DPB10202 DPA10301-DPB10401 DPA10301-DPB10402 DPA10301-DPB110501 DPA10301-DPB110601 DPA10301-DPB11801 DPA10301-DPB12301 DPA10301-DPB13901 DPA10301-DPB14001 DPA10301-DPB14901 DPA10301-DPB15501 DPA10301-DPB16501 DPA10301-DPB17501 DPA10301-DPB18001 DPA10401-DPB10101 DPA10401-DPB10201; note = HLAs: DPA10401-DPB10202 DPA10401-DPB10402 DPA10401-DPB10501 DPA10401-DPB110501 DPA10401-DPB14901
PPFLWIGFELLPDK

SEQ ID NO: 6210 - protein, 14 aa, synthetic construct
  source 1..14: note = Seed: PPFLWMGYELHPDK; note = HLAs: DRB1_1001 DPA10103-DPB10101 DPA10103-DPB10201 DPA10103-DPB10202 DPA10103-DPB10401 DPA10103-DPB112601 DPA10103-DPB11501 DPA10103-DPB11601 DPA10103-DPB11901 DPA10103-DPB12301 DPA10103-DPB13101 DPA10103-DPB13401 DPA10103-DPB13901 DPA10103-DPB14001 DPA10103-DPB14101 DPA10103-DPB14801 DPA10103-DPB15001 DPA10103-DPB15901 DPA10104-DPB10101 DPA10104-DPB11501 DPA10105-DPB10101 DPA10105-DPB10401 DPA10105-DPB15001 DPA10106-DPB10101 DPA10201-DPB10101 DPA10201-DPB110601 DPA10201-DPB11501 DPA10201-DPB11601 DPA10201-DPB11901 DPA10202-DPB10101 DPA10202-DPB10201 DPA10202-DPB10202 DPA10202-DPB10401 DPA10202-DPB110601 DPA10202-DPB11901 DPA10202-DPB13101 DPA10202-DPB16501 DPA10301-DPB10101 DPA10301-DPB10201 DPA10301-DPB10202 DPA10301-DPB10401 DPA10301-DPB10402 DPA10301-DPB110501 DPA10301-DPB110601 DPA10301-DPB11801 DPA10301-DPB12301 DPA10301-DPB13901 DPA10301-DPB14001 DPA10301-DPB14901 DPA10301-DPB15501 DPA10301-DPB16501 DPA10301-DPB17501 DPA10301-DPB18001 DPA10401-DPB10101 DPA10401-DPB10201; note = HLAs: DPA10401-DPB10202 DPA10401-DPB10402 DPA10401-DPB10501 DPA10401-DPB110501 DPA10401-DPB14901
PPFLWVGFELLPDK

SEQ ID NO: 6211 - protein, 14 aa, synthetic construct
  source 1..14: note = Seed: PPFLWMGYELHPDK; note = HLAs: DRB1_1001 DPA10103-DPB10101 DPA10103-DPB10201 DPA10103-DPB10202 DPA10103-DPB10401 DPA10103-DPB112601 DPA10103-DPB11501 DPA10103-DPB11601 DPA10103-DPB11901 DPA10103-DPB12301 DPA10103-DPB13101 DPA10103-DPB13401 DPA10103-DPB13901 DPA10103-DPB14001 DPA10103-DPB14101 DPA10103-DPB14801 DPA10103-DPB15001 DPA10103-DPB15901 DPA10104-DPB10101 DPA10104-DPB11501 DPA10105-DPB10101 DPA10105-DPB10401 DPA10105-DPB15001 DPA10106-DPB10101 DPA10201-DPB10101 DPA10201-DPB110601 DPA10201-DPB11501 DPA10201-DPB11601 DPA10201-DPB11901 DPA10202-DPB10101 DPA10202-DPB10201 DPA10202-DPB10202 DPA10202-DPB10401 DPA10202-DPB110601 DPA10202-DPB11901 DPA10202-DPB13101 DPA10202-DPB16501 DPA10301-DPB10101 DPA10301-DPB10201 DPA10301-DPB10202 DPA10301-DPB10401 DPA10301-DPB10402 DPA10301-DPB110501 DPA10301-DPB110601 DPA10301-DPB11801 DPA10301-DPB12301 DPA10301-DPB13901 DPA10301-DPB14001 DPA10301-DPB14901 DPA10301-DPB15501 DPA10301-DPB16501 DPA10301-DPB17501 DPA10301-DPB18001 DPA10401-DPB10101 DPA10401-DPB10201; note = HLAs: DPA10401-DPB10202 DPA10401-DPB10402 DPA10401-DPB10501 DPA10401-DPB110501 DPA10401-DPB14901
PPFLWNGFELLPDK

SEQ ID NO: 6212 - protein, 14 aa, synthetic construct
  source 1..14: note = Seed: PPFLWMGYELHPDK; note = HLAs: DRB1_1001 DPA10103-DPB10101 DPA10103-DPB10201 DPA10103-DPB10202 DPA10103-DPB10401 DPA10103-DPB112601 DPA10103-DPB11501 DPA10103-DPB11601 DPA10103-DPB11901 DPA10103-DPB12301 DPA10103-DPB13101 DPA10103-DPB13401 DPA10103-DPB13901 DPA10103-DPB14001 DPA10103-DPB14101 DPA10103-DPB14801 DPA10103-DPB15001 DPA10103-DPB15901 DPA10104-DPB10101 DPA10104-DPB11501 DPA10105-DPB10101 DPA10105-DPB10401 DPA10105-DPB15001 DPA10106-DPB10101 DPA10201-DPB10101 DPA10201-DPB110601 DPA10201-DPB11501 DPA10201-DPB11601 DPA10201-DPB11901 DPA10202-DPB10101 DPA10202-DPB10201 DPA10202-DPB10202 DPA10202-DPB10401 DPA10202-DPB110601 DPA10202-DPB11901 DPA10202-DPB13101 DPA10202-DPB16501 DPA10301-DPB10101 DPA10301-DPB10201 DPA10301-DPB10202 DPA10301-DPB10401 DPA10301-DPB10402 DPA10301-DPB110501 DPA10301-DPB110601 DPA10301-DPB11801 DPA10301-DPB12301 DPA10301-DPB13901 DPA10301-DPB14001 DPA10301-DPB14901 DPA10301-DPB15501 DPA10301-DPB16501 DPA10301-DPB17501 DPA10301-DPB18001 DPA10401-DPB10101 DPA10401-DPB10201; note = HLAs: DPA10401-DPB10202 DPA10401-DPB10402 DPA10401-DPB10501 DPA10401-DPB110501 DPA10401-DPB14901
PPYLWTGFELLPDK

SEQ ID NO: 6213 - protein, 14 aa, synthetic construct
  source 1..14: note = Seed: PPFLWMGYELHPDK; note = HLAs: DRB1_1001 DPA10103-DPB10101 DPA10103-DPB10201 DPA10103-DPB10202 DPA10103-DPB10401 DPA10103-DPB112601 DPA10103-DPB11501 DPA10103-DPB11601 DPA10103-DPB11901 DPA10103-DPB12301 DPA10103-DPB13101 DPA10103-DPB13401 DPA10103-DPB13901 DPA10103-DPB14001 DPA10103-DPB14101 DPA10103-DPB14801 DPA10103-DPB15001 DPA10103-DPB15901 DPA10104-DPB10101 DPA10104-DPB11501 DPA10105-DPB10101 DPA10105-DPB10401 DPA10105-DPB15001 DPA10106-DPB10101 DPA10201-DPB10101 DPA10201-DPB110601 DPA10201-DPB11501 DPA10201-DPB11601 DPA10201-DPB11901 DPA10202-DPB10101 DPA10202-DPB10201 DPA10202-DPB10202 DPA10202-DPB10401 DPA10202-DPB110601 DPA10202-DPB11901 DPA10202-DPB13101 DPA10202-DPB16501 DPA10301-DPB10101 DPA10301-DPB10201 DPA10301-DPB10202 DPA10301-DPB10401 DPA10301-DPB10402 DPA10301-DPB110501 DPA10301-DPB110601 DPA10301-DPB11801 DPA10301-DPB12301 DPA10301-DPB13901 DPA10301-DPB14001 DPA10301-DPB14901 DPA10301-DPB15501 DPA10301-DPB16501 DPA10301-DPB17501 DPA10301-DPB18001 DPA10401-DPB10101 DPA10401-DPB10201; note = HLAs: DPA10401-DPB10202 DPA10401-DPB10402 DPA10401-DPB10501 DPA10401-DPB110501 DPA10401-DPB14901
PPFLWVGFELVPDK

SEQ ID NO: 6214 - protein, 14 aa, synthetic construct
  source 1..14: note = Seed: PPFLWMGYELHPDK; note = HLAs: DRB1_1001 DPA10103-DPB10101 DPA10103-DPB10201 DPA10103-DPB10202 DPA10103-DPB10401 DPA10103-DPB112601 DPA10103-DPB11501 DPA10103-DPB11601 DPA10103-DPB11901 DPA10103-DPB12301 DPA10103-DPB13101 DPA10103-DPB13401 DPA10103-DPB13901 DPA10103-DPB14001 DPA10103-DPB14101 DPA10103-DPB14801 DPA10103-DPB15001 DPA10103-DPB15901 DPA10104-DPB10101 DPA10104-DPB11501 DPA10105-DPB10101 DPA10105-DPB10401 DPA10105-DPB15001 DPA10106-DPB10101 DPA10201-DPB10101 DPA10201-DPB110601 DPA10201-DPB11501 DPA10201-DPB11601 DPA10201-DPB11901 DPA10202-DPB10101 DPA10202-DPB10201 DPA10202-DPB10202 DPA10202-DPB10401 DPA10202-DPB110601 DPA10202-DPB11901 DPA10202-DPB13101 DPA10202-DPB16501 DPA10301-DPB10101 DPA10301-DPB10201 DPA10301-DPB10202 DPA10301-DPB10401 DPA10301-DPB10402 DPA10301-DPB110501 DPA10301-DPB110601 DPA10301-DPB11801 DPA10301-DPB12301 DPA10301-DPB13901 DPA10301-DPB14001 DPA10301-DPB14901 DPA10301-DPB15501 DPA10301-DPB16501 DPA10301-DPB17501 DPA10301-DPB18001 DPA10401-DPB10101 DPA10401-DPB10201; note = HLAs: DPA10401-DPB10202 DPA10401-DPB10402 DPA10401-DPB10501 DPA10401-DPB110501 DPA10401-DPB14901
PPFLWAGFELMPDK

SEQ ID NO: 6215 - protein, 20 aa, synthetic construct
  source 1..20: note = Seed: KEPPFLWMGYELHPDKWTVQ; note = HLAs: DRB1_0101 DRB1_1001 DPA10103-DPB10101 DPA10103-DPB10201 DPA10103-DPB10202 DPA10103-DPB10401 DPA10103-DPB10402 DPA10103-DPB10501 DPA10103-DPB110501 DPA10103-DPB112601 DPA10103-DPB11501 DPA10103-DPB11601 DPA10103-DPB11801 DPA10103-DPB11901 DPA10103-DPB12301 DPA10103-DPB13101 DPA10103-DPB13401 DPA10103-DPB13901 DPA10103-DPB14001 DPA10103-DPB14101 DPA10103-DPB14801 DPA10103-DPB14901 DPA10103-DPB15001 DPA10103-DPB15101 DPA10103-DPB15501 DPA10103-DPB15901 DPA10103-DPB18001 DPA10104-DPB10101 DPA10104-DPB11501 DPA10105-DPB10101 DPA10105-DPB10401 DPA10105-DPB11801 DPA10105-DPB15001 DPA10106-DPB10101 DPA10201-DPB10101 DPA10201-DPB10201 DPA10201-DPB10202 DPA10201-DPB10401 DPA10201-DPB10501 DPA10201-DPB110601 DPA10201-DPB11501 DPA10201-DPB11601 DPA10201-DPB11901 DPA10201-DPB13401 DPA10201-DPB15501 DPA10202-DPB10101 DPA10202-DPB10201 DPA10202-DPB10202 DPA10202-DPB10401 DPA10202-DPB10501 DPA10202-DPB110601 DPA10202-DPB11101 DPA10202-DPB11301 DPA10202-DPB11801 DPA10202-DPB11901; note = HLAs: DPA10202-DPB13101 DPA10202-DPB13801 DPA10202-DPB15501 DPA10202-DPB16501 DPA10301-DPB10101 DPA10301-DPB10201 DPA10301-DPB10202 DPA10301-DPB10401 DPA10301-DPB10402 DPA10301-DPB110501 DPA10301-DPB110601 DPA10301-DPB11101 DPA10301-DPB11301 DPA10301-DPB11801 DPA10301-DPB12301 DPA10301-DPB13901 DPA10301-DPB14001 DPA10301-DPB14901 DPA10301-DPB15501 DPA10301-DPB16501 DPA10301-DPB17501 DPA10301-DPB18001 DPA10401-DPB10101 DPA10401-DPB10201 DPA10401-DPB10202 DPA10401-DPB10402 DPA10401-DPB10501 DPA10401-DPB110501 DPA10401-DPB14901
KEPPFLWTGFELAPDKWTVQ

SEQ ID NO: 6216 - protein, 14 aa, synthetic construct
  source 1..14: note = Seed: PPFLWMGYELHPDK; note = HLAs: DRB1_1001 DPA10103-DPB10101 DPA10103-DPB10201 DPA10103-DPB10202 DPA10103-DPB10401 DPA10103-DPB112601 DPA10103-DPB11501 DPA10103-DPB11601 DPA10103-DPB11901 DPA10103-DPB12301 DPA10103-DPB13101 DPA10103-DPB13401 DPA10103-DPB13901 DPA10103-DPB14001 DPA10103-DPB14101 DPA10103-DPB14801 DPA10103-DPB15001 DPA10103-DPB15901 DPA10104-DPB10101 DPA10104-DPB11501 DPA10105-DPB10101 DPA10105-DPB10401 DPA10105-DPB15001 DPA10106-DPB10101 DPA10201-DPB10101 DPA10201-DPB110601 DPA10201-DPB11501 DPA10201-DPB11601 DPA10201-DPB11901 DPA10202-DPB10101 DPA10202-DPB10201 DPA10202-DPB10202 DPA10202-DPB10401 DPA10202-DPB110601 DPA10202-DPB11901 DPA10202-DPB13101 DPA10202-DPB16501 DPA10301-DPB10101 DPA10301-DPB10201 DPA10301-DPB10202 DPA10301-DPB10401 DPA10301-DPB10402 DPA10301-DPB110501 DPA10301-DPB110601 DPA10301-DPB11801 DPA10301-DPB12301 DPA10301-DPB13901 DPA10301-DPB14001 DPA10301-DPB14901 DPA10301-DPB15501 DPA10301-DPB16501 DPA10301-DPB17501 DPA10301-DPB18001 DPA10401-DPB10101 DPA10401-DPB10201; note = HLAs: DPA10401-DPB10202 DPA10401-DPB10402 DPA10401-DPB10501 DPA10401-DPB110501 DPA10401-DPB14901
PPFLWTGFELTPDK

SEQ ID NO: 6217 - protein, 14 aa, synthetic construct
  source 1..14: note = Seed: PPFLWMGYELHPDK; note = HLAs: DRB1_1001 DPA10103-DPB10101 DPA10103-DPB10201 DPA10103-DPB10202 DPA10103-DPB10401 DPA10103-DPB112601 DPA10103-DPB11501 DPA10103-DPB11601 DPA10103-DPB11901 DPA10103-DPB12301 DPA10103-DPB13101 DPA10103-DPB13401 DPA10103-DPB13901 DPA10103-DPB14001 DPA10103-DPB14101 DPA10103-DPB14801 DPA10103-DPB15001 DPA10103-DPB15901 DPA10104-DPB10101 DPA10104-DPB11501 DPA10105-DPB10101 DPA10105-DPB10401 DPA10105-DPB15001 DPA10106-DPB10101 DPA10201-DPB10101 DPA10201-DPB110601 DPA10201-DPB11501 DPA10201-DPB11601 DPA10201-DPB11901 DPA10202-DPB10101 DPA10202-DPB10201 DPA10202-DPB10202 DPA10202-DPB10401 DPA10202-DPB110601 DPA10202-DPB11901 DPA10202-DPB13101 DPA10202-DPB16501 DPA10301-DPB10101 DPA10301-DPB10201 DPA10301-DPB10202 DPA10301-DPB10401 DPA10301-DPB10402 DPA10301-DPB110501 DPA10301-DPB110601 DPA10301-DPB11801 DPA10301-DPB12301 DPA10301-DPB13901 DPA10301-DPB14001 DPA10301-DPB14901 DPA10301-DPB15501 DPA10301-DPB16501 DPA10301-DPB17501 DPA10301-DPB18001 DPA10401-DPB10101 DPA10401-DPB10201; note = HLAs: DPA10401-DPB10202 DPA10401-DPB10402 DPA10401-DPB10501 DPA10401-DPB110501 DPA10401-DPB14901
PPFLWSGFELAPDK

SEQ ID NO: 6218 - protein, 20 aa, synthetic construct
  source 1..20: note = Seed: KEPPFLWMGYELHPDKWTVQ; note = HLAs: DRB1_0101 DPA10103-DPB10101 DPA10103-DPB10201 DPA10103-DPB10202 DPA10103-DPB10401 DPA10103-DPB10402 DPA10103-DPB10501 DPA10103-DPB110501 DPA10103-DPB112601 DPA10103-DPB11501 DPA10103-DPB11601 DPA10103-DPB11801 DPA10103-DPB11901 DPA10103-DPB12301 DPA10103-DPB13101 DPA10103-DPB13401 DPA10103-DPB13901 DPA10103-DPB14001 DPA10103-DPB14101 DPA10103-DPB14801 DPA10103-DPB14901 DPA10103-DPB15001 DPA10103-DPB15101 DPA10103-DPB15501 DPA10103-DPB15901 DPA10103-DPB18001 DPA10104-DPB10101 DPA10104-DPB11501 DPA10105-DPB10101 DPA10105-DPB10401 DPA10105-DPB11801 DPA10105-DPB15001 DPA10106-DPB10101 DPA10201-DPB10101 DPA10201-DPB10201 DPA10201-DPB10202 DPA10201-DPB10401 DPA10201-DPB10501 DPA10201-DPB110601 DPA10201-DPB11501 DPA10201-DPB11601 DPA10201-DPB11901 DPA10201-DPB13401 DPA10201-DPB15501 DPA10202-DPB10101 DPA10202-DPB10201 DPA10202-DPB10202 DPA10202-DPB10401 DPA10202-DPB10501 DPA10202-DPB110601 DPA10202-DPB11101 DPA10202-DPB11301 DPA10202-DPB11801 DPA10202-DPB11901 DPA10202-DPB13101; note = HLAs: DPA10202-DPB13801 DPA10202-DPB15501 DPA10202-DPB16501 DPA10301-DPB10101 DPA10301-DPB10201 DPA10301-DPB10202 DPA10301-DPB10401 DPA10301-DPB10402 DPA10301-DPB110501 DPA10301-DPB110601 DPA10301-DPB11101 DPA10301-DPB11301 DPA10301-DPB11801 DPA10301-DPB12301 DPA10301-DPB13901 DPA10301-DPB14001 DPA10301-DPB14901 DPA10301-DPB15501 DPA10301-DPB16501 DPA10301-DPB17501 DPA10301-DPB18001 DPA10401-DPB10101 DPA10401-DPB10201 DPA10401-DPB10202 DPA10401-DPB10402 DPA10401-DPB10501 DPA10401-DPB110501 DPA10401-DPB14901
KEPPFLWEGFELIPDKWTVQ

SEQ ID NO: 6219 - protein, 20 aa, synthetic construct
  source 1..20: note = Seed: KEPPFLWMGYELHPDKWTVQ; note = HLAs: DPA10103-DPB10101 DPA10103-DPB10201 DPA10103-DPB10202 DPA10103-DPB10401 DPA10103-DPB10402 DPA10103-DPB10501 DPA10103-DPB110501 DPA10103-DPB112601 DPA10103-DPB11501 DPA10103-DPB11601 DPA10103-DPB11801 DPA10103-DPB11901 DPA10103-DPB12301 DPA10103-DPB13101 DPA10103-DPB13401 DPA10103-DPB13901 DPA10103-DPB14001 DPA10103-DPB14101 DPA10103-DPB14801 DPA10103-DPB14901 DPA10103-DPB15001 DPA10103-DPB15101 DPA10103-DPB15501 DPA10103-DPB15901 DPA10103-DPB18001 DPA10104-DPB10101 DPA10104-DPB11501 DPA10105-DPB10101 DPA10105-DPB10401 DPA10105-DPB11801 DPA10105-DPB15001 DPA10106-DPB10101 DPA10201-DPB10101 DPA10201-DPB10201 DPA10201-DPB10202 DPA10201-DPB10401 DPA10201-DPB10501 DPA10201-DPB110601 DPA10201-DPB11501 DPA10201-DPB11601 DPA10201-DPB11901 DPA10201-DPB13401 DPA10201-DPB15501 DPA10202-DPB10101 DPA10202-DPB10201 DPA10202-DPB10202 DPA10202-DPB10401 DPA10202-DPB10501 DPA10202-DPB110601 DPA10202-DPB11101 DPA10202-DPB11301 DPA10202-DPB11801 DPA10202-DPB11901 DPA10202-DPB13101 DPA10202-DPB13801; note = HLAs: DPA10202-DPB15501 DPA10202-DPB16501 DPA10301-DPB10101 DPA10301-DPB10201 DPA10301-DPB10202 DPA10301-DPB10401 DPA10301-DPB10402 DPA10301-DPB110501 DPA10301-DPB110601 DPA10301-DPB11101 DPA10301-DPB11301 DPA10301-DPB11801 DPA10301-DPB12301 DPA10301-DPB13901 DPA10301-DPB14001 DPA10301-DPB14901 DPA10301-DPB15501 DPA10301-DPB16501 DPA10301-DPB17501 DPA10301-DPB18001 DPA10401-DPB10101 DPA10401-DPB10201 DPA10401-DPB10202 DPA10401-DPB10402 DPA10401-DPB10501 DPA10401-DPB110501 DPA10401-DPB14901
KEPPFLWNGFELLPDKWTVQ

SEQ ID NO: 6220 - protein, 14 aa, synthetic construct
  source 1..14: note = Seed: PPFLWMGYELHPDK; note = HLAs: DRB1_1001 DPA10103-DPB10101 DPA10103-DPB10201 DPA10103-DPB10202 DPA10103-DPB10401 DPA10103-DPB112601 DPA10103-DPB11501 DPA10103-DPB11601 DPA10103-DPB11901 DPA10103-DPB12301 DPA10103-DPB13101 DPA10103-DPB13401 DPA10103-DPB13901 DPA10103-DPB14001 DPA10103-DPB14101 DPA10103-DPB14801 DPA10103-DPB15001 DPA10103-DPB15901 DPA10104-DPB10101 DPA10104-DPB11501 DPA10105-DPB10101 DPA10105-DPB10401 DPA10105-DPB15001 DPA10106-DPB10101 DPA10201-DPB10101 DPA10201-DPB110601 DPA10201-DPB11501 DPA10201-DPB11601 DPA10201-DPB11901 DPA10202-DPB10101 DPA10202-DPB10201 DPA10202-DPB10202 DPA10202-DPB10401 DPA10202-DPB110601 DPA10202-DPB11901 DPA10202-DPB13101 DPA10202-DPB16501 DPA10301-DPB10101 DPA10301-DPB10201 DPA10301-DPB10202 DPA10301-DPB10401 DPA10301-DPB10402 DPA10301-DPB110501 DPA10301-DPB110601 DPA10301-DPB11801 DPA10301-DPB12301 DPA10301-DPB13901 DPA10301-DPB14001 DPA10301-DPB14901 DPA10301-DPB15501 DPA10301-DPB16501 DPA10301-DPB17501 DPA10301-DPB18001 DPA10401-DPB10101 DPA10401-DPB10201; note = HLAs: DPA10401-DPB10202 DPA10401-DPB10402 DPA10401-DPB10501 DPA10401-DPB110501 DPA10401-DPB14901
PPFLWTGYELLPDK

SEQ ID NO: 6221 - protein, 14 aa, synthetic construct
  source 1..14: note = Seed: PPFLWMGYELHPDK; note = HLAs: DPA10103-DPB10101 DPA10103-DPB10201 DPA10103-DPB10202 DPA10103-DPB10401 DPA10103-DPB112601 DPA10103-DPB11501 DPA10103-DPB11601 DPA10103-DPB11901 DPA10103-DPB12301 DPA10103-DPB13101 DPA10103-DPB13401 DPA10103-DPB13901 DPA10103-DPB14001 DPA10103-DPB14101 DPA10103-DPB14801 DPA10103-DPB15001 DPA10103-DPB15901 DPA10104-DPB10101 DPA10104-DPB11501 DPA10105-DPB10101 DPA10105-DPB10401 DPA10105-DPB15001 DPA10106-DPB10101 DPA10201-DPB10101 DPA10201-DPB110601 DPA10201-DPB11501 DPA10201-DPB11601 DPA10201-DPB11901 DPA10202-DPB10101 DPA10202-DPB10201 DPA10202-DPB10202 DPA10202-DPB10401 DPA10202-DPB110601 DPA10202-DPB11901 DPA10202-DPB13101 DPA10202-DPB16501 DPA10301-DPB10101 DPA10301-DPB10201 DPA10301-DPB10202 DPA10301-DPB10401 DPA10301-DPB10402 DPA10301-DPB110501 DPA10301-DPB110601 DPA10301-DPB11801 DPA10301-DPB12301 DPA10301-DPB13901 DPA10301-DPB14001 DPA10301-DPB14901 DPA10301-DPB15501 DPA10301-DPB16501 DPA10301-DPB17501 DPA10301-DPB18001 DPA10401-DPB10101 DPA10401-DPB10201; note = HLAs: DPA10401-DPB10202 DPA10401-DPB10402 DPA10401-DPB10501 DPA10401-DPB110501 DPA10401-DPB14901
PPFLWSGFELTPDK

SEQ ID NO: 6222 - protein, 20 aa, synthetic construct
  source 1..20: note = Seed: KEPPFLWMGYELHPDKWTVQ; note = HLAs: DRB1_0101 DPA10103-DPB10101 DPA10103-DPB10201 DPA10103-DPB10202 DPA10103-DPB10401 DPA10103-DPB10402 DPA10103-DPB10501 DPA10103-DPB110501 DPA10103-DPB112601 DPA10103-DPB11501 DPA10103-DPB11601 DPA10103-DPB11801 DPA10103-DPB11901 DPA10103-DPB12301 DPA10103-DPB13101 DPA10103-DPB13401 DPA10103-DPB13901 DPA10103-DPB14001 DPA10103-DPB14101 DPA10103-DPB14801 DPA10103-DPB14901 DPA10103-DPB15001 DPA10103-DPB15101 DPA10103-DPB15501 DPA10103-DPB15901 DPA10103-DPB18001 DPA10104-DPB10101 DPA10104-DPB11501 DPA10105-DPB10101 DPA10105-DPB10401 DPA10105-DPB11801 DPA10105-DPB15001 DPA10106-DPB10101 DPA10201-DPB10101 DPA10201-DPB10201 DPA10201-DPB10202 DPA10201-DPB10401 DPA10201-DPB10501 DPA10201-DPB110601 DPA10201-DPB11501 DPA10201-DPB11601 DPA10201-DPB11901 DPA10201-DPB13401 DPA10201-DPB15501 DPA10202-DPB10101 DPA10202-DPB10201 DPA10202-DPB10202 DPA10202-DPB10401 DPA10202-DPB10501 DPA10202-DPB110601 DPA10202-DPB11101 DPA10202-DPB11301 DPA10202-DPB11801 DPA10202-DPB11901 DPA10202-DPB13101; note = HLAs: DPA10202-DPB13801 DPA10202-DPB15501 DPA10202-DPB16501 DPA10301-DPB10101 DPA10301-DPB10201 DPA10301-DPB10202 DPA10301-DPB10401 DPA10301-DPB10402 DPA10301-DPB110501 DPA10301-DPB110601 DPA10301-DPB11101 DPA10301-DPB11301 DPA10301-DPB11801 DPA10301-DPB12301 DPA10301-DPB13901 DPA10301-DPB14001 DPA10301-DPB14901 DPA10301-DPB15501 DPA10301-DPB16501 DPA10301-DPB17501 DPA10301-DPB18001 DPA10401-DPB10101 DPA10401-DPB10201 DPA10401-DPB10202 DPA10401-DPB10402 DPA10401-DPB10501 DPA10401-DPB110501 DPA10401-DPB14901
KEPPFLWEGFELLPDKWTVQ

SEQ ID NO: 6223 - protein, 14 aa, synthetic construct
  source 1..14: note = Seed: PPFLWMGYELHPDK; note = HLAs: DPA10103-DPB10101 DPA10103-DPB10201 DPA10103-DPB10202 DPA10103-DPB10401 DPA10103-DPB112601 DPA10103-DPB11501 DPA10103-DPB11601 DPA10103-DPB11901 DPA10103-DPB12301 DPA10103-DPB13101 DPA10103-DPB13401 DPA10103-DPB13901 DPA10103-DPB14001 DPA10103-DPB14101 DPA10103-DPB14801 DPA10103-DPB15001 DPA10103-DPB15901 DPA10104-DPB10101 DPA10104-DPB11501 DPA10105-DPB10101 DPA10105-DPB10401 DPA10105-DPB15001 DPA10106-DPB10101 DPA10201-DPB10101 DPA10201-DPB110601 DPA10201-DPB11501 DPA10201-DPB11601 DPA10201-DPB11901 DPA10202-DPB10101 DPA10202-DPB10201 DPA10202-DPB10202 DPA10202-DPB10401 DPA10202-DPB110601 DPA10202-DPB11901 DPA10202-DPB13101 DPA10202-DPB16501 DPA10301-DPB10101 DPA10301-DPB10201 DPA10301-DPB10202 DPA10301-DPB10401 DPA10301-DPB10402 DPA10301-DPB110501 DPA10301-DPB110601 DPA10301-DPB11801 DPA10301-DPB12301 DPA10301-DPB13901 DPA10301-DPB14001 DPA10301-DPB14901 DPA10301-DPB15501 DPA10301-DPB16501 DPA10301-DPB17501 DPA10301-DPB18001 DPA10401-DPB10101 DPA10401-DPB10201; note = HLAs: DPA10401-DPB10202 DPA10401-DPB10402 DPA10401-DPB10501 DPA10401-DPB110501 DPA10401-DPB14901
PPLLWSGFELLPDK

SEQ ID NO: 6224 - protein, 14 aa, synthetic construct
  source 1..14: note = Seed: PPFLWMGYELHPDK; note = HLAs: DRB1_1001 DPA10103-DPB10101 DPA10103-DPB10201 DPA10103-DPB10202 DPA10103-DPB10401 DPA10103-DPB112601 DPA10103-DPB11501 DPA10103-DPB11601 DPA10103-DPB11901 DPA10103-DPB12301 DPA10103-DPB13101 DPA10103-DPB13401 DPA10103-DPB13901 DPA10103-DPB14001 DPA10103-DPB14101 DPA10103-DPB14801 DPA10103-DPB15001 DPA10103-DPB15901 DPA10104-DPB10101 DPA10104-DPB11501 DPA10105-DPB10101 DPA10105-DPB10401 DPA10105-DPB15001 DPA10106-DPB10101 DPA10201-DPB10101 DPA10201-DPB110601 DPA10201-DPB11501 DPA10201-DPB11601 DPA10201-DPB11901 DPA10202-DPB10101 DPA10202-DPB10201 DPA10202-DPB10202 DPA10202-DPB10401 DPA10202-DPB110601 DPA10202-DPB11901 DPA10202-DPB13101 DPA10202-DPB16501 DPA10301-DPB10101 DPA10301-DPB10201 DPA10301-DPB10202 DPA10301-DPB10401 DPA10301-DPB10402 DPA10301-DPB110501 DPA10301-DPB110601 DPA10301-DPB11801 DPA10301-DPB12301 DPA10301-DPB13901 DPA10301-DPB14001 DPA10301-DPB14901 DPA10301-DPB15501 DPA10301-DPB16501 DPA10301-DPB17501 DPA10301-DPB18001 DPA10401-DPB10101 DPA10401-DPB10201; note = HLAs: DPA10401-DPB10202 DPA10401-DPB10402 DPA10401-DPB10501 DPA10401-DPB110501 DPA10401-DPB14901
PPFLWNGFELIPDK

SEQ ID NO: 6225 - protein, 14 aa, synthetic construct
  source 1..14: note = Seed: PPFLWMGYELHPDK; note = HLAs: DPA10103-DPB10101 DPA10103-DPB10201 DPA10103-DPB10202 DPA10103-DPB10401 DPA10103-DPB112601 DPA10103-DPB11501 DPA10103-DPB11601 DPA10103-DPB11901 DPA10103-DPB12301 DPA10103-DPB13101 DPA10103-DPB13401 DPA10103-DPB13901 DPA10103-DPB14001 DPA10103-DPB14101 DPA10103-DPB14801 DPA10103-DPB15001 DPA10103-DPB15901 DPA10104-DPB10101 DPA10104-DPB11501 DPA10105-DPB10101 DPA10105-DPB10401 DPA10105-DPB15001 DPA10106-DPB10101 DPA10201-DPB10101 DPA10201-DPB110601 DPA10201-DPB11501 DPA10201-DPB11601 DPA10201-DPB11901 DPA10202-DPB10101 DPA10202-DPB10201 DPA10202-DPB10202 DPA10202-DPB10401 DPA10202-DPB110601 DPA10202-DPB11901 DPA10202-DPB13101 DPA10202-DPB16501 DPA10301-DPB10101 DPA10301-DPB10201 DPA10301-DPB10202 DPA10301-DPB10401 DPA10301-DPB10402 DPA10301-DPB110501 DPA10301-DPB110601 DPA10301-DPB11801 DPA10301-DPB12301 DPA10301-DPB13901 DPA10301-DPB14001 DPA10301-DPB14901 DPA10301-DPB15501 DPA10301-DPB16501 DPA10301-DPB17501 DPA10301-DPB18001 DPA10401-DPB10101 DPA10401-DPB10201; note = HLAs: DPA10401-DPB10202 DPA10401-DPB10402 DPA10401-DPB10501 DPA10401-DPB110501 DPA10401-DPB14901
PPLLWTGFELLPDK

SEQ ID NO: 6226 - protein, 20 aa, synthetic construct
  source 1..20: note = Seed: KEPPFLWMGYELHPDKWTVQ; note = HLAs: DRB1_0101 DPA10103-DPB10101 DPA10103-DPB10201 DPA10103-DPB10202 DPA10103-DPB10401 DPA10103-DPB10402 DPA10103-DPB10501 DPA10103-DPB110501 DPA10103-DPB112601 DPA10103-DPB11501 DPA10103-DPB11601 DPA10103-DPB11801 DPA10103-DPB11901 DPA10103-DPB12301 DPA10103-DPB13101 DPA10103-DPB13401 DPA10103-DPB13901 DPA10103-DPB14001 DPA10103-DPB14101 DPA10103-DPB14801 DPA10103-DPB14901 DPA10103-DPB15001 DPA10103-DPB15101 DPA10103-DPB15501 DPA10103-DPB15901 DPA10103-DPB18001 DPA10104-DPB10101 DPA10104-DPB11501 DPA10105-DPB10101 DPA10105-DPB10401 DPA10105-DPB11801 DPA10105-DPB15001 DPA10106-DPB10101 DPA10201-DPB10101 DPA10201-DPB10201 DPA10201-DPB10202 DPA10201-DPB10401 DPA10201-DPB10501 DPA10201-DPB110601 DPA10201-DPB11501 DPA10201-DPB11601 DPA10201-DPB11901 DPA10201-DPB13401 DPA10201-DPB15501 DPA10202-DPB10101 DPA10202-DPB10201 DPA10202-DPB10202 DPA10202-DPB10401 DPA10202-DPB10501 DPA10202-DPB110601 DPA10202-DPB11101 DPA10202-DPB11301 DPA10202-DPB11801 DPA10202-DPB11901 DPA10202-DPB13101; note = HLAs: DPA10202-DPB13801 DPA10202-DPB15501 DPA10202-DPB16501 DPA10301-DPB10101 DPA10301-DPB10201 DPA10301-DPB10202 DPA10301-DPB10401 DPA10301-DPB10402 DPA10301-DPB110501 DPA10301-DPB110601 DPA10301-DPB11101 DPA10301-DPB11301 DPA10301-DPB11801 DPA10301-DPB12301 DPA10301-DPB13901 DPA10301-DPB14001 DPA10301-DPB14901 DPA10301-DPB15501 DPA10301-DPB16501 DPA10301-DPB17501 DPA10301-DPB18001 DPA10401-DPB10101 DPA10401-DPB10201 DPA10401-DPB10202 DPA10401-DPB10402 DPA10401-DPB10501 DPA10401-DPB110501 DPA10401-DPB14901
KEPPFLWSGFELFPDKWTVQ

SEQ ID NO: 6227 - protein, 20 aa, synthetic construct
  source 1..20: note = Seed: KEPPFLWMGYELHPDKWTVQ; note = HLAs: DRB1_0101 DRB1_1001 DPA10103-DPB10101 DPA10103-DPB10201 DPA10103-DPB10202 DPA10103-DPB10401 DPA10103-DPB10402 DPA10103-DPB10501 DPA10103-DPB110501 DPA10103-DPB112601 DPA10103-DPB11501 DPA10103-DPB11601 DPA10103-DPB11801 DPA10103-DPB11901 DPA10103-DPB12301 DPA10103-DPB13101 DPA10103-DPB13401 DPA10103-DPB13901 DPA10103-DPB14001 DPA10103-DPB14101 DPA10103-DPB14801 DPA10103-DPB14901 DPA10103-DPB15001 DPA10103-DPB15101 DPA10103-DPB15501 DPA10103-DPB15901 DPA10103-DPB18001 DPA10104-DPB10101 DPA10104-DPB11501 DPA10105-DPB10101 DPA10105-DPB10401 DPA10105-DPB11801 DPA10105-DPB15001 DPA10106-DPB10101 DPA10201-DPB10101 DPA10201-DPB10201 DPA10201-DPB10202 DPA10201-DPB10401 DPA10201-DPB10501 DPA10201-DPB110601 DPA10201-DPB11501 DPA10201-DPB11601 DPA10201-DPB11901 DPA10201-DPB13401 DPA10201-DPB15501 DPA10202-DPB10101 DPA10202-DPB10201 DPA10202-DPB10202 DPA10202-DPB10401 DPA10202-DPB10501 DPA10202-DPB110601 DPA10202-DPB11101 DPA10202-DPB11301 DPA10202-DPB11801 DPA10202-DPB11901; note = HLAs: DPA10202-DPB13101 DPA10202-DPB13801 DPA10202-DPB15501 DPA10202-DPB16501 DPA10301-DPB10101 DPA10301-DPB10201 DPA10301-DPB10202 DPA10301-DPB10401 DPA10301-DPB10402 DPA10301-DPB110501 DPA10301-DPB110601 DPA10301-DPB11101 DPA10301-DPB11301 DPA10301-DPB11801 DPA10301-DPB12301 DPA10301-DPB13901 DPA10301-DPB14001 DPA10301-DPB14901 DPA10301-DPB15501 DPA10301-DPB16501 DPA10301-DPB17501 DPA10301-DPB18001 DPA10401-DPB10101 DPA10401-DPB10201 DPA10401-DPB10202 DPA10401-DPB10402 DPA10401-DPB10501 DPA10401-DPB110501 DPA10401-DPB14901
KEPPFLWTGFELTPDKWTVQ

SEQ ID NO: 6228 - protein, 20 aa, synthetic construct
  source 1..20: note = Seed: KEPPFLWMGYELHPDKWTVQ; note = HLAs: DRB1_0101 DRB1_1001 DPA10103-DPB10101 DPA10103-DPB10201 DPA10103-DPB10202 DPA10103-DPB10401 DPA10103-DPB10402 DPA10103-DPB10501 DPA10103-DPB110501 DPA10103-DPB112601 DPA10103-DPB11501 DPA10103-DPB11601 DPA10103-DPB11801 DPA10103-DPB11901 DPA10103-DPB12301 DPA10103-DPB13101 DPA10103-DPB13401 DPA10103-DPB13901 DPA10103-DPB14001 DPA10103-DPB14101 DPA10103-DPB14801 DPA10103-DPB14901 DPA10103-DPB15001 DPA10103-DPB15101 DPA10103-DPB15501 DPA10103-DPB15901 DPA10103-DPB18001 DPA10104-DPB10101 DPA10104-DPB11501 DPA10105-DPB10101 DPA10105-DPB10401 DPA10105-DPB11801 DPA10105-DPB15001 DPA10106-DPB10101 DPA10201-DPB10101 DPA10201-DPB10201 DPA10201-DPB10202 DPA10201-DPB10401 DPA10201-DPB10501 DPA10201-DPB110601 DPA10201-DPB11501 DPA10201-DPB11601 DPA10201-DPB11901 DPA10201-DPB13401 DPA10201-DPB15501 DPA10202-DPB10101 DPA10202-DPB10201 DPA10202-DPB10202 DPA10202-DPB10401 DPA10202-DPB10501 DPA10202-DPB110601 DPA10202-DPB11101 DPA10202-DPB11301 DPA10202-DPB11801 DPA10202-DPB11901; note = HLAs: DPA10202-DPB13101 DPA10202-DPB13801 DPA10202-DPB15501 DPA10202-DPB16501 DPA10301-DPB10101 DPA10301-DPB10201 DPA10301-DPB10202 DPA10301-DPB10401 DPA10301-DPB10402 DPA10301-DPB110501 DPA10301-DPB110601 DPA10301-DPB11101 DPA10301-DPB11301 DPA10301-DPB11801 DPA10301-DPB12301 DPA10301-DPB13901 DPA10301-DPB14001 DPA10301-DPB14901 DPA10301-DPB15501 DPA10301-DPB16501 DPA10301-DPB17501 DPA10301-DPB18001 DPA10401-DPB10101 DPA10401-DPB10201 DPA10401-DPB10202 DPA10401-DPB10402 DPA10401-DPB10501 DPA10401-DPB110501 DPA10401-DPB14901
KEPPFLWNGFELVPDKWTVQ

SEQ ID NO: 6229 - protein, 14 aa, synthetic construct
  source 1..14: note = Seed: PPFLWMGYELHPDK; note = HLAs: DPA10103-DPB10101 DPA10103-DPB10201 DPA10103-DPB10202 DPA10103-DPB10401 DPA10103-DPB112601 DPA10103-DPB11501 DPA10103-DPB11601 DPA10103-DPB11901 DPA10103-DPB12301 DPA10103-DPB13101 DPA10103-DPB13401 DPA10103-DPB13901 DPA10103-DPB14001 DPA10103-DPB14101 DPA10103-DPB14801 DPA10103-DPB15001 DPA10103-DPB15901 DPA10104-DPB10101 DPA10104-DPB11501 DPA10105-DPB10101 DPA10105-DPB10401 DPA10105-DPB15001 DPA10106-DPB10101 DPA10201-DPB10101 DPA10201-DPB110601 DPA10201-DPB11501 DPA10201-DPB11601 DPA10201-DPB11901 DPA10202-DPB10101 DPA10202-DPB10201 DPA10202-DPB10202 DPA10202-DPB10401 DPA10202-DPB110601 DPA10202-DPB11901 DPA10202-DPB13101 DPA10202-DPB16501 DPA10301-DPB10101 DPA10301-DPB10201 DPA10301-DPB10202 DPA10301-DPB10401 DPA10301-DPB10402 DPA10301-DPB110501 DPA10301-DPB110601 DPA10301-DPB11801 DPA10301-DPB12301 DPA10301-DPB13901 DPA10301-DPB14001 DPA10301-DPB14901 DPA10301-DPB15501 DPA10301-DPB16501 DPA10301-DPB17501 DPA10301-DPB18001 DPA10401-DPB10101 DPA10401-DPB10201; note = HLAs: DPA10401-DPB10202 DPA10401-DPB10402 DPA10401-DPB10501 DPA10401-DPB110501 DPA10401-DPB14901
PPFLWTGFELYPDK

SEQ ID NO: 6230 - protein, 20 aa, synthetic construct
  source 1..20: note = Seed: KEPPFLWMGYELHPDKWTVQ; note = HLAs: DRB1_0101 DPA10103-DPB10101 DPA10103-DPB10201 DPA10103-DPB10202 DPA10103-DPB10401 DPA10103-DPB10402 DPA10103-DPB10501 DPA10103-DPB110501 DPA10103-DPB112601 DPA10103-DPB11501 DPA10103-DPB11601 DPA10103-DPB11801 DPA10103-DPB11901 DPA10103-DPB12301 DPA10103-DPB13101 DPA10103-DPB13401 DPA10103-DPB13901 DPA10103-DPB14001 DPA10103-DPB14101 DPA10103-DPB14801 DPA10103-DPB14901 DPA10103-DPB15001 DPA10103-DPB15101 DPA10103-DPB15501 DPA10103-DPB15901 DPA10103-DPB18001 DPA10104-DPB10101 DPA10104-DPB11501 DPA10105-DPB10101 DPA10105-DPB10401 DPA10105-DPB11801 DPA10105-DPB15001 DPA10106-DPB10101 DPA10201-DPB10101 DPA10201-DPB10201 DPA10201-DPB10202 DPA10201-DPB10401 DPA10201-DPB10501 DPA10201-DPB110601 DPA10201-DPB11501 DPA10201-DPB11601 DPA10201-DPB11901 DPA10201-DPB13401 DPA10201-DPB15501 DPA10202-DPB10101 DPA10202-DPB10201 DPA10202-DPB10202 DPA10202-DPB10401 DPA10202-DPB10501 DPA10202-DPB110601 DPA10202-DPB11101 DPA10202-DPB11301 DPA10202-DPB11801 DPA10202-DPB11901 DPA10202-DPB13101; note = HLAs: DPA10202-DPB13801 DPA10202-DPB15501 DPA10202-DPB16501 DPA10301-DPB10101 DPA10301-DPB10201 DPA10301-DPB10202 DPA10301-DPB10401 DPA10301-DPB10402 DPA10301-DPB110501 DPA10301-DPB110601 DPA10301-DPB11101 DPA10301-DPB11301 DPA10301-DPB11801 DPA10301-DPB12301 DPA10301-DPB13901 DPA10301-DPB14001 DPA10301-DPB14901 DPA10301-DPB15501 DPA10301-DPB16501 DPA10301-DPB17501 DPA10301-DPB18001 DPA10401-DPB10101 DPA10401-DPB10201 DPA10401-DPB10202 DPA10401-DPB10402 DPA10401-DPB10501 DPA10401-DPB110501 DPA10401-DPB14901
KEPPYLWSGFELLPDKWTVQ

SEQ ID NO: 6231 - protein, 14 aa, synthetic construct
  source 1..14: note = Seed: PPFLWMGYELHPDK; note = HLAs: DRB1_1001 DPA10103-DPB10101 DPA10103-DPB10201 DPA10103-DPB10202 DPA10103-DPB10401 DPA10103-DPB112601 DPA10103-DPB11501 DPA10103-DPB11601 DPA10103-DPB11901 DPA10103-DPB12301 DPA10103-DPB13101 DPA10103-DPB13401 DPA10103-DPB13901 DPA10103-DPB14001 DPA10103-DPB14101 DPA10103-DPB14801 DPA10103-DPB15001 DPA10103-DPB15901 DPA10104-DPB10101 DPA10104-DPB11501 DPA10105-DPB10101 DPA10105-DPB10401 DPA10105-DPB15001 DPA10106-DPB10101 DPA10201-DPB10101 DPA10201-DPB110601 DPA10201-DPB11501 DPA10201-DPB11601 DPA10201-DPB11901 DPA10202-DPB10101 DPA10202-DPB10201 DPA10202-DPB10202 DPA10202-DPB10401 DPA10202-DPB110601 DPA10202-DPB11901 DPA10202-DPB13101 DPA10202-DPB16501 DPA10301-DPB10101 DPA10301-DPB10201 DPA10301-DPB10202 DPA10301-DPB10401 DPA10301-DPB10402 DPA10301-DPB110501 DPA10301-DPB110601 DPA10301-DPB11801 DPA10301-DPB12301 DPA10301-DPB13901 DPA10301-DPB14001 DPA10301-DPB14901 DPA10301-DPB15501 DPA10301-DPB16501 DPA10301-DPB17501 DPA10301-DPB18001 DPA10401-DPB10101 DPA10401-DPB10201; note = HLAs: DPA10401-DPB10202 DPA10401-DPB10402 DPA10401-DPB10501 DPA10401-DPB110501 DPA10401-DPB14901
PPFLWVGFELIPDK

SEQ ID NO: 6232 - protein, 14 aa, synthetic construct
  source 1..14: note = Seed: PPFLWMGYELHPDK; note = HLAs: DRB1_1001 DPA10103-DPB10101 DPA10103-DPB10201 DPA10103-DPB10202 DPA10103-DPB10401 DPA10103-DPB112601 DPA10103-DPB11501 DPA10103-DPB11601 DPA10103-DPB11901 DPA10103-DPB12301 DPA10103-DPB13101 DPA10103-DPB13401 DPA10103-DPB13901 DPA10103-DPB14001 DPA10103-DPB14101 DPA10103-DPB14801 DPA10103-DPB15001 DPA10103-DPB15901 DPA10104-DPB10101 DPA10104-DPB11501 DPA10105-DPB10101 DPA10105-DPB10401 DPA10105-DPB15001 DPA10106-DPB10101 DPA10201-DPB10101 DPA10201-DPB110601 DPA10201-DPB11501 DPA10201-DPB11601 DPA10201-DPB11901 DPA10202-DPB10101 DPA10202-DPB10201 DPA10202-DPB10202 DPA10202-DPB10401 DPA10202-DPB110601 DPA10202-DPB11901 DPA10202-DPB13101 DPA10202-DPB16501 DPA10301-DPB10101 DPA10301-DPB10201 DPA10301-DPB10202 DPA10301-DPB10401 DPA10301-DPB10402 DPA10301-DPB110501 DPA10301-DPB110601 DPA10301-DPB11801 DPA10301-DPB12301 DPA10301-DPB13901 DPA10301-DPB14001 DPA10301-DPB14901 DPA10301-DPB15501 DPA10301-DPB16501 DPA10301-DPB17501 DPA10301-DPB18001 DPA10401-DPB10101 DPA10401-DPB10201; note = HLAs: DPA10401-DPB10202 DPA10401-DPB10402 DPA10401-DPB10501 DPA10401-DPB110501 DPA10401-DPB14901
PPFLWIGFELIPDK

SEQ ID NO: 6233 - protein, 20 aa, synthetic construct
  source 1..20: note = Seed: KEPPFLWMGYELHPDKWTVQ; note = HLAs: DRB1_0101 DPA10103-DPB10101 DPA10103-DPB10201 DPA10103-DPB10202 DPA10103-DPB10401 DPA10103-DPB10402 DPA10103-DPB10501 DPA10103-DPB110501 DPA10103-DPB112601 DPA10103-DPB11501 DPA10103-DPB11601 DPA10103-DPB11801 DPA10103-DPB11901 DPA10103-DPB12301 DPA10103-DPB13101 DPA10103-DPB13401 DPA10103-DPB13901 DPA10103-DPB14001 DPA10103-DPB14101 DPA10103-DPB14801 DPA10103-DPB14901 DPA10103-DPB15001 DPA10103-DPB15101 DPA10103-DPB15501 DPA10103-DPB15901 DPA10103-DPB18001 DPA10104-DPB10101 DPA10104-DPB11501 DPA10105-DPB10101 DPA10105-DPB10401 DPA10105-DPB11801 DPA10105-DPB15001 DPA10106-DPB10101 DPA10201-DPB10101 DPA10201-DPB10201 DPA10201-DPB10202 DPA10201-DPB10401 DPA10201-DPB10501 DPA10201-DPB110601 DPA10201-DPB11501 DPA10201-DPB11601 DPA10201-DPB11901 DPA10201-DPB13401 DPA10201-DPB15501 DPA10202-DPB10101 DPA10202-DPB10201 DPA10202-DPB10202 DPA10202-DPB10401 DPA10202-DPB10501 DPA10202-DPB110601 DPA10202-DPB11101 DPA10202-DPB11301 DPA10202-DPB11801 DPA10202-DPB11901 DPA10202-DPB13101; note = HLAs: DPA10202-DPB13801 DPA10202-DPB15501 DPA10202-DPB16501 DPA10301-DPB10101 DPA10301-DPB10201 DPA10301-DPB10202 DPA10301-DPB10401 DPA10301-DPB10402 DPA10301-DPB110501 DPA10301-DPB110601 DPA10301-DPB11101 DPA10301-DPB11301 DPA10301-DPB11801 DPA10301-DPB12301 DPA10301-DPB13901 DPA10301-DPB14001 DPA10301-DPB14901 DPA10301-DPB15501 DPA10301-DPB16501 DPA10301-DPB17501 DPA10301-DPB18001 DPA10401-DPB10101 DPA10401-DPB10201 DPA10401-DPB10202 DPA10401-DPB10402 DPA10401-DPB10501 DPA10401-DPB110501 DPA10401-DPB14901
KEPPYLWTGFELLPDKWTVQ

SEQ ID NO: 6234 - protein, 14 aa, synthetic construct
  source 1..14: note = Seed: PPFLWMGYELHPDK; note = HLAs: DRB1_1001 DPA10103-DPB10101 DPA10103-DPB10201 DPA10103-DPB10202 DPA10103-DPB10401 DPA10103-DPB112601 DPA10103-DPB11501 DPA10103-DPB11601 DPA10103-DPB11901 DPA10103-DPB12301 DPA10103-DPB13101 DPA10103-DPB13401 DPA10103-DPB13901 DPA10103-DPB14001 DPA10103-DPB14101 DPA10103-DPB14801 DPA10103-DPB15001 DPA10103-DPB15901 DPA10104-DPB10101 DPA10104-DPB11501 DPA10105-DPB10101 DPA10105-DPB10401 DPA10105-DPB15001 DPA10106-DPB10101 DPA10201-DPB10101 DPA10201-DPB110601 DPA10201-DPB11501 DPA10201-DPB11601 DPA10201-DPB11901 DPA10202-DPB10101 DPA10202-DPB10201 DPA10202-DPB10202 DPA10202-DPB10401 DPA10202-DPB110601 DPA10202-DPB11901 DPA10202-DPB13101 DPA10202-DPB16501 DPA10301-DPB10101 DPA10301-DPB10201 DPA10301-DPB10202 DPA10301-DPB10401 DPA10301-DPB10402 DPA10301-DPB110501 DPA10301-DPB110601 DPA10301-DPB11801 DPA10301-DPB12301 DPA10301-DPB13901 DPA10301-DPB14001 DPA10301-DPB14901 DPA10301-DPB15501 DPA10301-DPB16501 DPA10301-DPB17501 DPA10301-DPB18001 DPA10401-DPB10101 DPA10401-DPB10201; note = HLAs: DPA10401-DPB10202 DPA10401-DPB10402 DPA10401-DPB10501 DPA10401-DPB110501 DPA10401-DPB14901
PPFLWNGFELVPDK

SEQ ID NO: 6235 - protein, 14 aa, synthetic construct
  source 1..14: note = Seed: PPFLWMGYELHPDK; note = HLAs: DPA10103-DPB10101 DPA10103-DPB10201 DPA10103-DPB10202 DPA10103-DPB10401 DPA10103-DPB112601 DPA10103-DPB11501 DPA10103-DPB11601 DPA10103-DPB11901 DPA10103-DPB12301 DPA10103-DPB13101 DPA10103-DPB13401 DPA10103-DPB13901 DPA10103-DPB14001 DPA10103-DPB14101 DPA10103-DPB14801 DPA10103-DPB15001 DPA10103-DPB15901 DPA10104-DPB10101 DPA10104-DPB11501 DPA10105-DPB10101 DPA10105-DPB10401 DPA10105-DPB15001 DPA10106-DPB10101 DPA10201-DPB10101 DPA10201-DPB110601 DPA10201-DPB11501 DPA10201-DPB11601 DPA10201-DPB11901 DPA10202-DPB10101 DPA10202-DPB10201 DPA10202-DPB10202 DPA10202-DPB10401 DPA10202-DPB110601 DPA10202-DPB11901 DPA10202-DPB13101 DPA10202-DPB16501 DPA10301-DPB10101 DPA10301-DPB10201 DPA10301-DPB10202 DPA10301-DPB10401 DPA10301-DPB10402 DPA10301-DPB110501 DPA10301-DPB110601 DPA10301-DPB11801 DPA10301-DPB12301 DPA10301-DPB13901 DPA10301-DPB14001 DPA10301-DPB14901 DPA10301-DPB15501 DPA10301-DPB16501 DPA10301-DPB17501 DPA10301-DPB18001 DPA10401-DPB10101 DPA10401-DPB10201; note = HLAs: DPA10401-DPB10202 DPA10401-DPB10402 DPA10401-DPB10501 DPA10401-DPB110501 DPA10401-DPB14901
PPLLWSGFELVPDK

SEQ ID NO: 6236 - protein, 14 aa, synthetic construct
  source 1..14: note = Seed: PPFLWMGYELHPDK; note = HLAs: DRB1_1001 DPA10103-DPB10101 DPA10103-DPB10201 DPA10103-DPB10202 DPA10103-DPB10401 DPA10103-DPB112601 DPA10103-DPB11501 DPA10103-DPB11601 DPA10103-DPB11901 DPA10103-DPB12301 DPA10103-DPB13101 DPA10103-DPB13401 DPA10103-DPB13901 DPA10103-DPB14001 DPA10103-DPB14101 DPA10103-DPB14801 DPA10103-DPB15001 DPA10103-DPB15901 DPA10104-DPB10101 DPA10104-DPB11501 DPA10105-DPB10101 DPA10105-DPB10401 DPA10105-DPB15001 DPA10106-DPB10101 DPA10201-DPB10101 DPA10201-DPB110601 DPA10201-DPB11501 DPA10201-DPB11601 DPA10201-DPB11901 DPA10202-DPB10101 DPA10202-DPB10201 DPA10202-DPB10202 DPA10202-DPB10401 DPA10202-DPB110601 DPA10202-DPB11901 DPA10202-DPB13101 DPA10202-DPB16501 DPA10301-DPB10101 DPA10301-DPB10201 DPA10301-DPB10202 DPA10301-DPB10401 DPA10301-DPB10402 DPA10301-DPB110501 DPA10301-DPB110601 DPA10301-DPB11801 DPA10301-DPB12301 DPA10301-DPB13901 DPA10301-DPB14001 DPA10301-DPB14901 DPA10301-DPB15501 DPA10301-DPB16501 DPA10301-DPB17501 DPA10301-DPB18001 DPA10401-DPB10101 DPA10401-DPB10201; note = HLAs: DPA10401-DPB10202 DPA10401-DPB10402 DPA10401-DPB10501 DPA10401-DPB110501 DPA10401-DPB14901
PPYLWSGFELIPDK

SEQ ID NO: 6237 - protein, 20 aa, synthetic construct
  source 1..20: note = Seed: KEPPFLWMGYELHPDKWTVQ; note = HLAs: DRB1_0101 DRB1_1001 DPA10103-DPB10101 DPA10103-DPB10201 DPA10103-DPB10202 DPA10103-DPB10401 DPA10103-DPB10402 DPA10103-DPB10501 DPA10103-DPB110501 DPA10103-DPB112601 DPA10103-DPB11501 DPA10103-DPB11601 DPA10103-DPB11801 DPA10103-DPB11901 DPA10103-DPB12301 DPA10103-DPB13101 DPA10103-DPB13401 DPA10103-DPB13901 DPA10103-DPB14001 DPA10103-DPB14101 DPA10103-DPB14801 DPA10103-DPB14901 DPA10103-DPB15001 DPA10103-DPB15101 DPA10103-DPB15501 DPA10103-DPB15901 DPA10103-DPB18001 DPA10104-DPB10101 DPA10104-DPB11501 DPA10105-DPB10101 DPA10105-DPB10401 DPA10105-DPB11801 DPA10105-DPB15001 DPA10106-DPB10101 DPA10201-DPB10101 DPA10201-DPB10201 DPA10201-DPB10202 DPA10201-DPB10401 DPA10201-DPB10501 DPA10201-DPB110601 DPA10201-DPB11501 DPA10201-DPB11601 DPA10201-DPB11901 DPA10201-DPB13401 DPA10201-DPB15501 DPA10202-DPB10101 DPA10202-DPB10201 DPA10202-DPB10202 DPA10202-DPB10401 DPA10202-DPB10501 DPA10202-DPB110601 DPA10202-DPB11101 DPA10202-DPB11301 DPA10202-DPB11801 DPA10202-DPB11901; note = HLAs: DPA10202-DPB13101 DPA10202-DPB13801 DPA10202-DPB15501 DPA10202-DPB16501 DPA10301-DPB10101 DPA10301-DPB10201 DPA10301-DPB10202 DPA10301-DPB10401 DPA10301-DPB10402 DPA10301-DPB110501 DPA10301-DPB110601 DPA10301-DPB11101 DPA10301-DPB11301 DPA10301-DPB11801 DPA10301-DPB12301 DPA10301-DPB13901 DPA10301-DPB14001 DPA10301-DPB14901 DPA10301-DPB15501 DPA10301-DPB16501 DPA10301-DPB17501 DPA10301-DPB18001 DPA10401-DPB10101 DPA10401-DPB10201 DPA10401-DPB10202 DPA10401-DPB10402 DPA10401-DPB10501 DPA10401-DPB110501 DPA10401-DPB14901
KEPPYLWSGFELVPDKWTVQ

SEQ ID NO: 6238 - protein, 14 aa, synthetic construct
  source 1..14: note = Seed: PPFLWMGYELHPDK; note = HLAs: DRB1_1001 DPA10103-DPB10101 DPA10103-DPB10201 DPA10103-DPB10202 DPA10103-DPB10401 DPA10103-DPB112601 DPA10103-DPB11501 DPA10103-DPB11601 DPA10103-DPB11901 DPA10103-DPB12301 DPA10103-DPB13101 DPA10103-DPB13401 DPA10103-DPB13901 DPA10103-DPB14001 DPA10103-DPB14101 DPA10103-DPB14801 DPA10103-DPB15001 DPA10103-DPB15901 DPA10104-DPB10101 DPA10104-DPB11501 DPA10105-DPB10101 DPA10105-DPB10401 DPA10105-DPB15001 DPA10106-DPB10101 DPA10201-DPB10101 DPA10201-DPB110601 DPA10201-DPB11501 DPA10201-DPB11601 DPA10201-DPB11901 DPA10202-DPB10101 DPA10202-DPB10201 DPA10202-DPB10202 DPA10202-DPB10401 DPA10202-DPB110601 DPA10202-DPB11901 DPA10202-DPB13101 DPA10202-DPB16501 DPA10301-DPB10101 DPA10301-DPB10201 DPA10301-DPB10202 DPA10301-DPB10401 DPA10301-DPB10402 DPA10301-DPB110501 DPA10301-DPB110601 DPA10301-DPB11801 DPA10301-DPB12301 DPA10301-DPB13901 DPA10301-DPB14001 DPA10301-DPB14901 DPA10301-DPB15501 DPA10301-DPB16501 DPA10301-DPB17501 DPA10301-DPB18001 DPA10401-DPB10101 DPA10401-DPB10201; note = HLAs: DPA10401-DPB10202 DPA10401-DPB10402 DPA10401-DPB10501 DPA10401-DPB110501 DPA10401-DPB14901
PPFLWTGFELSPDK

SEQ ID NO: 6239 - protein, 20 aa, synthetic construct
  source 1..20: note = Seed: KEPPFLWMGYELHPDKWTVQ; note = HLAs: DRB1_0101 DPA10103-DPB10101 DPA10103-DPB10201 DPA10103-DPB10202 DPA10103-DPB10401 DPA10103-DPB10402 DPA10103-DPB10501 DPA10103-DPB110501 DPA10103-DPB112601 DPA10103-DPB11501 DPA10103-DPB11601 DPA10103-DPB11801 DPA10103-DPB11901 DPA10103-DPB12301 DPA10103-DPB13101 DPA10103-DPB13401 DPA10103-DPB13901 DPA10103-DPB14001 DPA10103-DPB14101 DPA10103-DPB14801 DPA10103-DPB14901 DPA10103-DPB15001 DPA10103-DPB15101 DPA10103-DPB15501 DPA10103-DPB15901 DPA10103-DPB18001 DPA10104-DPB10101 DPA10104-DPB11501 DPA10105-DPB10101 DPA10105-DPB10401 DPA10105-DPB11801 DPA10105-DPB15001 DPA10106-DPB10101 DPA10201-DPB10101 DPA10201-DPB10201 DPA10201-DPB10202 DPA10201-DPB10401 DPA10201-DPB10501 DPA10201-DPB110601 DPA10201-DPB11501 DPA10201-DPB11601 DPA10201-DPB11901 DPA10201-DPB13401 DPA10201-DPB15501 DPA10202-DPB10101 DPA10202-DPB10201 DPA10202-DPB10202 DPA10202-DPB10401 DPA10202-DPB10501 DPA10202-DPB110601 DPA10202-DPB11101 DPA10202-DPB11301 DPA10202-DPB11801 DPA10202-DPB11901 DPA10202-DPB13101; note = HLAs: DPA10202-DPB13801 DPA10202-DPB15501 DPA10202-DPB16501 DPA10301-DPB10101 DPA10301-DPB10201 DPA10301-DPB10202 DPA10301-DPB10401 DPA10301-DPB10402 DPA10301-DPB110501 DPA10301-DPB110601 DPA10301-DPB11101 DPA10301-DPB11301 DPA10301-DPB11801 DPA10301-DPB12301 DPA10301-DPB13901 DPA10301-DPB14001 DPA10301-DPB14901 DPA10301-DPB15501 DPA10301-DPB16501 DPA10301-DPB17501 DPA10301-DPB18001 DPA10401-DPB10101 DPA10401-DPB10201 DPA10401-DPB10202 DPA10401-DPB10402 DPA10401-DPB10501 DPA10401-DPB110501 DPA10401-DPB14901
KEPPFLWTGYELLPDKWTVQ

SEQ ID NO: 6240 - protein, 14 aa, synthetic construct
  source 1..14: note = Seed: PPFLWMGYELHPDK; note = HLAs: DPA10103-DPB10101 DPA10103-DPB10201 DPA10103-DPB10202 DPA10103-DPB10401 DPA10103-DPB112601 DPA10103-DPB11501 DPA10103-DPB11601 DPA10103-DPB11901 DPA10103-DPB12301 DPA10103-DPB13101 DPA10103-DPB13401 DPA10103-DPB13901 DPA10103-DPB14001 DPA10103-DPB14101 DPA10103-DPB14801 DPA10103-DPB15001 DPA10103-DPB15901 DPA10104-DPB10101 DPA10104-DPB11501 DPA10105-DPB10101 DPA10105-DPB10401 DPA10105-DPB15001 DPA10106-DPB10101 DPA10201-DPB10101 DPA10201-DPB110601 DPA10201-DPB11501 DPA10201-DPB11601 DPA10201-DPB11901 DPA10202-DPB10101 DPA10202-DPB10201 DPA10202-DPB10202 DPA10202-DPB10401 DPA10202-DPB110601 DPA10202-DPB11901 DPA10202-DPB13101 DPA10202-DPB16501 DPA10301-DPB10101 DPA10301-DPB10201 DPA10301-DPB10202 DPA10301-DPB10401 DPA10301-DPB10402 DPA10301-DPB110501 DPA10301-DPB110601 DPA10301-DPB11801 DPA10301-DPB12301 DPA10301-DPB13901 DPA10301-DPB14001 DPA10301-DPB14901 DPA10301-DPB15501 DPA10301-DPB16501 DPA10301-DPB17501 DPA10301-DPB18001 DPA10401-DPB10101 DPA10401-DPB10201; note = HLAs: DPA10401-DPB10202 DPA10401-DPB10402 DPA10401-DPB10501 DPA10401-DPB110501 DPA10401-DPB14901
PPFLWHGFELFPDK

SEQ ID NO: 6241 - protein, 20 aa, synthetic construct
  source 1..20: note = Seed: KEPPFLWMGYELHPDKWTVQ; note = HLAs: DPA10103-DPB10101 DPA10103-DPB10201 DPA10103-DPB10202 DPA10103-DPB10401 DPA10103-DPB10402 DPA10103-DPB10501 DPA10103-DPB110501 DPA10103-DPB112601 DPA10103-DPB11501 DPA10103-DPB11601 DPA10103-DPB11801 DPA10103-DPB11901 DPA10103-DPB12301 DPA10103-DPB13101 DPA10103-DPB13401 DPA10103-DPB13901 DPA10103-DPB14001 DPA10103-DPB14101 DPA10103-DPB14801 DPA10103-DPB14901 DPA10103-DPB15001 DPA10103-DPB15101 DPA10103-DPB15501 DPA10103-DPB15901 DPA10103-DPB18001 DPA10104-DPB10101 DPA10104-DPB11501 DPA10105-DPB10101 DPA10105-DPB10401 DPA10105-DPB11801 DPA10105-DPB15001 DPA10106-DPB10101 DPA10201-DPB10101 DPA10201-DPB10201 DPA10201-DPB10202 DPA10201-DPB10401 DPA10201-DPB10501 DPA10201-DPB110601 DPA10201-DPB11501 DPA10201-DPB11601 DPA10201-DPB11901 DPA10201-DPB13401 DPA10201-DPB15501 DPA10202-DPB10101 DPA10202-DPB10201 DPA10202-DPB10202 DPA10202-DPB10401 DPA10202-DPB10501 DPA10202-DPB110601 DPA10202-DPB11101 DPA10202-DPB11301 DPA10202-DPB11801 DPA10202-DPB11901 DPA10202-DPB13101 DPA10202-DPB13801; note = HLAs: DPA10202-DPB15501 DPA10202-DPB16501 DPA10301-DPB10101 DPA10301-DPB10201 DPA10301-DPB10202 DPA10301-DPB10401 DPA10301-DPB10402 DPA10301-DPB110501 DPA10301-DPB110601 DPA10301-DPB11101 DPA10301-DPB11301 DPA10301-DPB11801 DPA10301-DPB12301 DPA10301-DPB13901 DPA10301-DPB14001 DPA10301-DPB14901 DPA10301-DPB15501 DPA10301-DPB16501 DPA10301-DPB17501 DPA10301-DPB18001 DPA10401-DPB10101 DPA10401-DPB10201 DPA10401-DPB10202 DPA10401-DPB10402 DPA10401-DPB10501 DPA10401-DPB110501 DPA10401-DPB14901
KEPPFLWAGFELMPDKWTVQ

SEQ ID NO: 6242 - protein, 20 aa, synthetic construct
  source 1..20: note = Seed: KEPPFLWMGYELHPDKWTVQ; note = HLAs: DRB1_0101 DPA10103-DPB10101 DPA10103-DPB10201 DPA10103-DPB10202 DPA10103-DPB10401 DPA10103-DPB10402 DPA10103-DPB10501 DPA10103-DPB110501 DPA10103-DPB112601 DPA10103-DPB11501 DPA10103-DPB11601 DPA10103-DPB11801 DPA10103-DPB11901 DPA10103-DPB12301 DPA10103-DPB13101 DPA10103-DPB13401 DPA10103-DPB13901 DPA10103-DPB14001 DPA10103-DPB14101 DPA10103-DPB14801 DPA10103-DPB14901 DPA10103-DPB15001 DPA10103-DPB15101 DPA10103-DPB15501 DPA10103-DPB15901 DPA10103-DPB18001 DPA10104-DPB10101 DPA10104-DPB11501 DPA10105-DPB10101 DPA10105-DPB10401 DPA10105-DPB11801 DPA10105-DPB15001 DPA10106-DPB10101 DPA10201-DPB10101 DPA10201-DPB10201 DPA10201-DPB10202 DPA10201-DPB10401 DPA10201-DPB10501 DPA10201-DPB110601 DPA10201-DPB11501 DPA10201-DPB11601 DPA10201-DPB11901 DPA10201-DPB13401 DPA10201-DPB15501 DPA10202-DPB10101 DPA10202-DPB10201 DPA10202-DPB10202 DPA10202-DPB10401 DPA10202-DPB10501 DPA10202-DPB110601 DPA10202-DPB11101 DPA10202-DPB11301 DPA10202-DPB11801 DPA10202-DPB11901 DPA10202-DPB13101; note = HLAs: DPA10202-DPB13801 DPA10202-DPB15501 DPA10202-DPB16501 DPA10301-DPB10101 DPA10301-DPB10201 DPA10301-DPB10202 DPA10301-DPB10401 DPA10301-DPB10402 DPA10301-DPB110501 DPA10301-DPB110601 DPA10301-DPB11101 DPA10301-DPB11301 DPA10301-DPB11801 DPA10301-DPB12301 DPA10301-DPB13901 DPA10301-DPB14001 DPA10301-DPB14901 DPA10301-DPB15501 DPA10301-DPB16501 DPA10301-DPB17501 DPA10301-DPB18001 DPA10401-DPB10101 DPA10401-DPB10201 DPA10401-DPB10202 DPA10401-DPB10402 DPA10401-DPB10501 DPA10401-DPB110501 DPA10401-DPB14901
KEPPFLWTGFELFPDKWTVQ

SEQ ID NO: 6243 - protein, 20 aa, synthetic construct
  source 1..20: note = Seed: KEPPFLWMGYELHPDKWTVQ; note = HLAs: DRB1_0101 DPA10103-DPB10101 DPA10103-DPB10201 DPA10103-DPB10202 DPA10103-DPB10401 DPA10103-DPB10402 DPA10103-DPB10501 DPA10103-DPB110501 DPA10103-DPB112601 DPA10103-DPB11501 DPA10103-DPB11601 DPA10103-DPB11801 DPA10103-DPB11901 DPA10103-DPB12301 DPA10103-DPB13101 DPA10103-DPB13401 DPA10103-DPB13901 DPA10103-DPB14001 DPA10103-DPB14101 DPA10103-DPB14801 DPA10103-DPB14901 DPA10103-DPB15001 DPA10103-DPB15101 DPA10103-DPB15501 DPA10103-DPB15901 DPA10103-DPB18001 DPA10104-DPB10101 DPA10104-DPB11501 DPA10105-DPB10101 DPA10105-DPB10401 DPA10105-DPB11801 DPA10105-DPB15001 DPA10106-DPB10101 DPA10201-DPB10101 DPA10201-DPB10201 DPA10201-DPB10202 DPA10201-DPB10401 DPA10201-DPB10501 DPA10201-DPB110601 DPA10201-DPB11501 DPA10201-DPB11601 DPA10201-DPB11901 DPA10201-DPB13401 DPA10201-DPB15501 DPA10202-DPB10101 DPA10202-DPB10201 DPA10202-DPB10202 DPA10202-DPB10401 DPA10202-DPB10501 DPA10202-DPB110601 DPA10202-DPB11101 DPA10202-DPB11301 DPA10202-DPB11801 DPA10202-DPB11901 DPA10202-DPB13101; note = HLAs: DPA10202-DPB13801 DPA10202-DPB15501 DPA10202-DPB16501 DPA10301-DPB10101 DPA10301-DPB10201 DPA10301-DPB10202 DPA10301-DPB10401 DPA10301-DPB10402 DPA10301-DPB110501 DPA10301-DPB110601 DPA10301-DPB11101 DPA10301-DPB11301 DPA10301-DPB11801 DPA10301-DPB12301 DPA10301-DPB13901 DPA10301-DPB14001 DPA10301-DPB14901 DPA10301-DPB15501 DPA10301-DPB16501 DPA10301-DPB17501 DPA10301-DPB18001 DPA10401-DPB10101 DPA10401-DPB10201 DPA10401-DPB10202 DPA10401-DPB10402 DPA10401-DPB10501 DPA10401-DPB110501 DPA10401-DPB14901
KEPPFLWQGFELIPDKWTVQ

SEQ ID NO: 6244 - protein, 20 aa, synthetic construct
  source 1..20: note = Seed: KEPPFLWMGYELHPDKWTVQ; note = HLAs: DRB1_0101 DPA10103-DPB10101 DPA10103-DPB10201 DPA10103-DPB10202 DPA10103-DPB10401 DPA10103-DPB10402 DPA10103-DPB10501 DPA10103-DPB110501 DPA10103-DPB112601 DPA10103-DPB11501 DPA10103-DPB11601 DPA10103-DPB11801 DPA10103-DPB11901 DPA10103-DPB12301 DPA10103-DPB13101 DPA10103-DPB13401 DPA10103-DPB13901 DPA10103-DPB14001 DPA10103-DPB14101 DPA10103-DPB14801 DPA10103-DPB14901 DPA10103-DPB15001 DPA10103-DPB15101 DPA10103-DPB15501 DPA10103-DPB15901 DPA10103-DPB18001 DPA10104-DPB10101 DPA10104-DPB11501 DPA10105-DPB10101 DPA10105-DPB10401 DPA10105-DPB11801 DPA10105-DPB15001 DPA10106-DPB10101 DPA10201-DPB10101 DPA10201-DPB10201 DPA10201-DPB10202 DPA10201-DPB10401 DPA10201-DPB10501 DPA10201-DPB110601 DPA10201-DPB11501 DPA10201-DPB11601 DPA10201-DPB11901 DPA10201-DPB13401 DPA10201-DPB15501 DPA10202-DPB10101 DPA10202-DPB10201 DPA10202-DPB10202 DPA10202-DPB10401 DPA10202-DPB10501 DPA10202-DPB110601 DPA10202-DPB11101 DPA10202-DPB11301 DPA10202-DPB11801 DPA10202-DPB11901 DPA10202-DPB13101; note = HLAs: DPA10202-DPB13801 DPA10202-DPB15501 DPA10202-DPB16501 DPA10301-DPB10101 DPA10301-DPB10201 DPA10301-DPB10202 DPA10301-DPB10401 DPA10301-DPB10402 DPA10301-DPB110501 DPA10301-DPB110601 DPA10301-DPB11101 DPA10301-DPB11301 DPA10301-DPB11801 DPA10301-DPB12301 DPA10301-DPB13901 DPA10301-DPB14001 DPA10301-DPB14901 DPA10301-DPB15501 DPA10301-DPB16501 DPA10301-DPB17501 DPA10301-DPB18001 DPA10401-DPB10101 DPA10401-DPB10201 DPA10401-DPB10202 DPA10401-DPB10402 DPA10401-DPB10501 DPA10401-DPB110501 DPA10401-DPB14901
KEPPFLWQGFELLPDKWTVQ

SEQ ID NO: 6245 - protein, 14 aa, synthetic construct
  source 1..14: note = Seed: PPFLWMGYELHPDK; note = HLAs: DPA10103-DPB10101 DPA10103-DPB10201 DPA10103-DPB10202 DPA10103-DPB10401 DPA10103-DPB112601 DPA10103-DPB11501 DPA10103-DPB11601 DPA10103-DPB11901 DPA10103-DPB12301 DPA10103-DPB13101 DPA10103-DPB13401 DPA10103-DPB13901 DPA10103-DPB14001 DPA10103-DPB14101 DPA10103-DPB14801 DPA10103-DPB15001 DPA10103-DPB15901 DPA10104-DPB10101 DPA10104-DPB11501 DPA10105-DPB10101 DPA10105-DPB10401 DPA10105-DPB15001 DPA10106-DPB10101 DPA10201-DPB10101 DPA10201-DPB110601 DPA10201-DPB11501 DPA10201-DPB11601 DPA10201-DPB11901 DPA10202-DPB10101 DPA10202-DPB10201 DPA10202-DPB10202 DPA10202-DPB10401 DPA10202-DPB110601 DPA10202-DPB11901 DPA10202-DPB13101 DPA10202-DPB16501 DPA10301-DPB10101 DPA10301-DPB10201 DPA10301-DPB10202 DPA10301-DPB10401 DPA10301-DPB10402 DPA10301-DPB110501 DPA10301-DPB110601 DPA10301-DPB11801 DPA10301-DPB12301 DPA10301-DPB13901 DPA10301-DPB14001 DPA10301-DPB14901 DPA10301-DPB15501 DPA10301-DPB16501 DPA10301-DPB17501 DPA10301-DPB18001 DPA10401-DPB10101 DPA10401-DPB10201; note = HLAs: DPA10401-DPB10202 DPA10401-DPB10402 DPA10401-DPB10501 DPA10401-DPB110501 DPA10401-DPB14901
PPFLWTGYELVPDK

SEQ ID NO: 6246 - protein, 20 aa, synthetic construct
  source 1..20: note = Seed: KEPPFLWMGYELHPDKWTVQ; note = HLAs: DRB1_0101 DRB1_1001 DPA10103-DPB10101 DPA10103-DPB10201 DPA10103-DPB10202 DPA10103-DPB10401 DPA10103-DPB10402 DPA10103-DPB10501 DPA10103-DPB110501 DPA10103-DPB112601 DPA10103-DPB11501 DPA10103-DPB11601 DPA10103-DPB11801 DPA10103-DPB11901 DPA10103-DPB12301 DPA10103-DPB13101 DPA10103-DPB13401 DPA10103-DPB13901 DPA10103-DPB14001 DPA10103-DPB14101 DPA10103-DPB14801 DPA10103-DPB14901 DPA10103-DPB15001 DPA10103-DPB15101 DPA10103-DPB15501 DPA10103-DPB15901 DPA10103-DPB18001 DPA10104-DPB10101 DPA10104-DPB11501 DPA10105-DPB10101 DPA10105-DPB10401 DPA10105-DPB11801 DPA10105-DPB15001 DPA10106-DPB10101 DPA10201-DPB10101 DPA10201-DPB10201 DPA10201-DPB10202 DPA10201-DPB10401 DPA10201-DPB10501 DPA10201-DPB110601 DPA10201-DPB11501 DPA10201-DPB11601 DPA10201-DPB11901 DPA10201-DPB13401 DPA10201-DPB15501 DPA10202-DPB10101 DPA10202-DPB10201 DPA10202-DPB10202 DPA10202-DPB10401 DPA10202-DPB10501 DPA10202-DPB110601 DPA10202-DPB11101 DPA10202-DPB11301 DPA10202-DPB11801 DPA10202-DPB11901; note = HLAs: DPA10202-DPB13101 DPA10202-DPB13801 DPA10202-DPB15501 DPA10202-DPB16501 DPA10301-DPB10101 DPA10301-DPB10201 DPA10301-DPB10202 DPA10301-DPB10401 DPA10301-DPB10402 DPA10301-DPB110501 DPA10301-DPB110601 DPA10301-DPB11101 DPA10301-DPB11301 DPA10301-DPB11801 DPA10301-DPB12301 DPA10301-DPB13901 DPA10301-DPB14001 DPA10301-DPB14901 DPA10301-DPB15501 DPA10301-DPB16501 DPA10301-DPB17501 DPA10301-DPB18001 DPA10401-DPB10101 DPA10401-DPB10201 DPA10401-DPB10202 DPA10401-DPB10402 DPA10401-DPB10501 DPA10401-DPB110501 DPA10401-DPB14901
KEPPFLWTGFELSPDKWTVQ

SEQ ID NO: 6247 - protein, 14 aa, synthetic construct
  source 1..14: note = Seed: PPFLWMGYELHPDK; note = HLAs: DPA10103-DPB10101 DPA10103-DPB10201 DPA10103-DPB10202 DPA10103-DPB10401 DPA10103-DPB112601 DPA10103-DPB11501 DPA10103-DPB11601 DPA10103-DPB11901 DPA10103-DPB12301 DPA10103-DPB13101 DPA10103-DPB13401 DPA10103-DPB13901 DPA10103-DPB14001 DPA10103-DPB14101 DPA10103-DPB14801 DPA10103-DPB15001 DPA10103-DPB15901 DPA10104-DPB10101 DPA10104-DPB11501 DPA10105-DPB10101 DPA10105-DPB10401 DPA10105-DPB15001 DPA10106-DPB10101 DPA10201-DPB10101 DPA10201-DPB110601 DPA10201-DPB11501 DPA10201-DPB11601 DPA10201-DPB11901 DPA10202-DPB10101 DPA10202-DPB10201 DPA10202-DPB10202 DPA10202-DPB10401 DPA10202-DPB110601 DPA10202-DPB11901 DPA10202-DPB13101 DPA10202-DPB16501 DPA10301-DPB10101 DPA10301-DPB10201 DPA10301-DPB10202 DPA10301-DPB10401 DPA10301-DPB10402 DPA10301-DPB110501 DPA10301-DPB110601 DPA10301-DPB11801 DPA10301-DPB12301 DPA10301-DPB13901 DPA10301-DPB14001 DPA10301-DPB14901 DPA10301-DPB15501 DPA10301-DPB16501 DPA10301-DPB17501 DPA10301-DPB18001 DPA10401-DPB10101 DPA10401-DPB10201; note = HLAs: DPA10401-DPB10202 DPA10401-DPB10402 DPA10401-DPB10501 DPA10401-DPB110501 DPA10401-DPB14901
PPFLWHGFELMPDK

SEQ ID NO: 6248 - protein, 20 aa, synthetic construct
  source 1..20: note = Seed: KEPPFLWMGYELHPDKWTVQ; note = HLAs: DRB1_0101 DPA10103-DPB10101 DPA10103-DPB10201 DPA10103-DPB10202 DPA10103-DPB10401 DPA10103-DPB10402 DPA10103-DPB10501 DPA10103-DPB110501 DPA10103-DPB112601 DPA10103-DPB11501 DPA10103-DPB11601 DPA10103-DPB11801 DPA10103-DPB11901 DPA10103-DPB12301 DPA10103-DPB13101 DPA10103-DPB13401 DPA10103-DPB13901 DPA10103-DPB14001 DPA10103-DPB14101 DPA10103-DPB14801 DPA10103-DPB14901 DPA10103-DPB15001 DPA10103-DPB15101 DPA10103-DPB15501 DPA10103-DPB15901 DPA10103-DPB18001 DPA10104-DPB10101 DPA10104-DPB11501 DPA10105-DPB10101 DPA10105-DPB10401 DPA10105-DPB11801 DPA10105-DPB15001 DPA10106-DPB10101 DPA10201-DPB10101 DPA10201-DPB10201 DPA10201-DPB10202 DPA10201-DPB10401 DPA10201-DPB10501 DPA10201-DPB110601 DPA10201-DPB11501 DPA10201-DPB11601 DPA10201-DPB11901 DPA10201-DPB13401 DPA10201-DPB15501 DPA10202-DPB10101 DPA10202-DPB10201 DPA10202-DPB10202 DPA10202-DPB10401 DPA10202-DPB10501 DPA10202-DPB110601 DPA10202-DPB11101 DPA10202-DPB11301 DPA10202-DPB11801 DPA10202-DPB11901 DPA10202-DPB13101; note = HLAs: DPA10202-DPB13801 DPA10202-DPB15501 DPA10202-DPB16501 DPA10301-DPB10101 DPA10301-DPB10201 DPA10301-DPB10202 DPA10301-DPB10401 DPA10301-DPB10402 DPA10301-DPB110501 DPA10301-DPB110601 DPA10301-DPB11101 DPA10301-DPB11301 DPA10301-DPB11801 DPA10301-DPB12301 DPA10301-DPB13901 DPA10301-DPB14001 DPA10301-DPB14901 DPA10301-DPB15501 DPA10301-DPB16501 DPA10301-DPB17501 DPA10301-DPB18001 DPA10401-DPB10101 DPA10401-DPB10201 DPA10401-DPB10202 DPA10401-DPB10402 DPA10401-DPB10501 DPA10401-DPB110501 DPA10401-DPB14901
KEPPYLWTGFELIPDKWTVQ

SEQ ID NO: 6249 - protein, 20 aa, synthetic construct
  source 1..20: note = Seed: KEPPFLWMGYELHPDKWTVQ; note = HLAs: DPA10103-DPB10101 DPA10103-DPB10201 DPA10103-DPB10202 DPA10103-DPB10401 DPA10103-DPB10402 DPA10103-DPB10501 DPA10103-DPB110501 DPA10103-DPB112601 DPA10103-DPB11501 DPA10103-DPB11601 DPA10103-DPB11801 DPA10103-DPB11901 DPA10103-DPB12301 DPA10103-DPB13101 DPA10103-DPB13401 DPA10103-DPB13901 DPA10103-DPB14001 DPA10103-DPB14101 DPA10103-DPB14801 DPA10103-DPB14901 DPA10103-DPB15001 DPA10103-DPB15101 DPA10103-DPB15501 DPA10103-DPB15901 DPA10103-DPB18001 DPA10104-DPB10101 DPA10104-DPB11501 DPA10105-DPB10101 DPA10105-DPB10401 DPA10105-DPB11801 DPA10105-DPB15001 DPA10106-DPB10101 DPA10201-DPB10101 DPA10201-DPB10201 DPA10201-DPB10202 DPA10201-DPB10401 DPA10201-DPB10501 DPA10201-DPB110601 DPA10201-DPB11501 DPA10201-DPB11601 DPA10201-DPB11901 DPA10201-DPB13401 DPA10201-DPB15501 DPA10202-DPB10101 DPA10202-DPB10201 DPA10202-DPB10202 DPA10202-DPB10401 DPA10202-DPB10501 DPA10202-DPB110601 DPA10202-DPB11101 DPA10202-DPB11301 DPA10202-DPB11801 DPA10202-DPB11901 DPA10202-DPB13101 DPA10202-DPB13801; note = HLAs: DPA10202-DPB15501 DPA10202-DPB16501 DPA10301-DPB10101 DPA10301-DPB10201 DPA10301-DPB10202 DPA10301-DPB10401 DPA10301-DPB10402 DPA10301-DPB110501 DPA10301-DPB110601 DPA10301-DPB11101 DPA10301-DPB11301 DPA10301-DPB11801 DPA10301-DPB12301 DPA10301-DPB13901 DPA10301-DPB14001 DPA10301-DPB14901 DPA10301-DPB15501 DPA10301-DPB16501 DPA10301-DPB17501 DPA10301-DPB18001 DPA10401-DPB10101 DPA10401-DPB10201 DPA10401-DPB10202 DPA10401-DPB10402 DPA10401-DPB10501 DPA10401-DPB110501 DPA10401-DPB14901
KEPPFLWHGFELMPDKWTVQ

SEQ ID NO: 6250 - protein, 14 aa, synthetic construct
  source 1..14: note = Seed: PPFLWMGYELHPDK; note = HLAs: DRB1_1001 DPA10103-DPB10101 DPA10103-DPB10201 DPA10103-DPB10202 DPA10103-DPB10401 DPA10103-DPB112601 DPA10103-DPB11501 DPA10103-DPB11601 DPA10103-DPB11901 DPA10103-DPB12301 DPA10103-DPB13101 DPA10103-DPB13401 DPA10103-DPB13901 DPA10103-DPB14001 DPA10103-DPB14101 DPA10103-DPB14801 DPA10103-DPB15001 DPA10103-DPB15901 DPA10104-DPB10101 DPA10104-DPB11501 DPA10105-DPB10101 DPA10105-DPB10401 DPA10105-DPB15001 DPA10106-DPB10101 DPA10201-DPB10101 DPA10201-DPB110601 DPA10201-DPB11501 DPA10201-DPB11601 DPA10201-DPB11901 DPA10202-DPB10101 DPA10202-DPB10201 DPA10202-DPB10202 DPA10202-DPB10401 DPA10202-DPB110601 DPA10202-DPB11901 DPA10202-DPB13101 DPA10202-DPB16501 DPA10301-DPB10101 DPA10301-DPB10201 DPA10301-DPB10202 DPA10301-DPB10401 DPA10301-DPB10402 DPA10301-DPB110501 DPA10301-DPB110601 DPA10301-DPB11801 DPA10301-DPB12301 DPA10301-DPB13901 DPA10301-DPB14001 DPA10301-DPB14901 DPA10301-DPB15501 DPA10301-DPB16501 DPA10301-DPB17501 DPA10301-DPB18001 DPA10401-DPB10101 DPA10401-DPB10201; note = HLAs: DPA10401-DPB10202 DPA10401-DPB10402 DPA10401-DPB10501 DPA10401-DPB110501 DPA10401-DPB14901
PPFLWSGYELLPDK

SEQ ID NO: 6251 - protein, 14 aa, synthetic construct
  source 1..14: note = Seed: PPFLWMGYELHPDK; note = HLAs: DPA10103-DPB10101 DPA10103-DPB10201 DPA10103-DPB10202 DPA10103-DPB10401 DPA10103-DPB112601 DPA10103-DPB11501 DPA10103-DPB11601 DPA10103-DPB11901 DPA10103-DPB12301 DPA10103-DPB13101 DPA10103-DPB13401 DPA10103-DPB13901 DPA10103-DPB14001 DPA10103-DPB14101 DPA10103-DPB14801 DPA10103-DPB15001 DPA10103-DPB15901 DPA10104-DPB10101 DPA10104-DPB11501 DPA10105-DPB10101 DPA10105-DPB10401 DPA10105-DPB15001 DPA10106-DPB10101 DPA10201-DPB10101 DPA10201-DPB110601 DPA10201-DPB11501 DPA10201-DPB11601 DPA10201-DPB11901 DPA10202-DPB10101 DPA10202-DPB10201 DPA10202-DPB10202 DPA10202-DPB10401 DPA10202-DPB110601 DPA10202-DPB11901 DPA10202-DPB13101 DPA10202-DPB16501 DPA10301-DPB10101 DPA10301-DPB10201 DPA10301-DPB10202 DPA10301-DPB10401 DPA10301-DPB10402 DPA10301-DPB110501 DPA10301-DPB110601 DPA10301-DPB11801 DPA10301-DPB12301 DPA10301-DPB13901 DPA10301-DPB14001 DPA10301-DPB14901 DPA10301-DPB15501 DPA10301-DPB16501 DPA10301-DPB17501 DPA10301-DPB18001 DPA10401-DPB10101 DPA10401-DPB10201; note = HLAs: DPA10401-DPB10202 DPA10401-DPB10402 DPA10401-DPB10501 DPA10401-DPB110501 DPA10401-DPB14901
PPFLWSGFELYPDK

SEQ ID NO: 6252 - protein, 20 aa, synthetic construct
  source 1..20: note = Seed: KEPPFLWMGYELHPDKWTVQ; note = HLAs: DRB1_0101 DRB1_1001 DPA10103-DPB10101 DPA10103-DPB10201 DPA10103-DPB10202 DPA10103-DPB10401 DPA10103-DPB10402 DPA10103-DPB10501 DPA10103-DPB110501 DPA10103-DPB112601 DPA10103-DPB11501 DPA10103-DPB11601 DPA10103-DPB11801 DPA10103-DPB11901 DPA10103-DPB12301 DPA10103-DPB13101 DPA10103-DPB13401 DPA10103-DPB13901 DPA10103-DPB14001 DPA10103-DPB14101 DPA10103-DPB14801 DPA10103-DPB14901 DPA10103-DPB15001 DPA10103-DPB15101 DPA10103-DPB15501 DPA10103-DPB15901 DPA10103-DPB18001 DPA10104-DPB10101 DPA10104-DPB11501 DPA10105-DPB10101 DPA10105-DPB10401 DPA10105-DPB11801 DPA10105-DPB15001 DPA10106-DPB10101 DPA10201-DPB10101 DPA10201-DPB10201 DPA10201-DPB10202 DPA10201-DPB10401 DPA10201-DPB10501 DPA10201-DPB110601 DPA10201-DPB11501 DPA10201-DPB11601 DPA10201-DPB11901 DPA10201-DPB13401 DPA10201-DPB15501 DPA10202-DPB10101 DPA10202-DPB10201 DPA10202-DPB10202 DPA10202-DPB10401 DPA10202-DPB10501 DPA10202-DPB110601 DPA10202-DPB11101 DPA10202-DPB11301 DPA10202-DPB11801 DPA10202-DPB11901; note = HLAs: DPA10202-DPB13101 DPA10202-DPB13801 DPA10202-DPB15501 DPA10202-DPB16501 DPA10301-DPB10101 DPA10301-DPB10201 DPA10301-DPB10202 DPA10301-DPB10401 DPA10301-DPB10402 DPA10301-DPB110501 DPA10301-DPB110601 DPA10301-DPB11101 DPA10301-DPB11301 DPA10301-DPB11801 DPA10301-DPB12301 DPA10301-DPB13901 DPA10301-DPB14001 DPA10301-DPB14901 DPA10301-DPB15501 DPA10301-DPB16501 DPA10301-DPB17501 DPA10301-DPB18001 DPA10401-DPB10101 DPA10401-DPB10201 DPA10401-DPB10202 DPA10401-DPB10402 DPA10401-DPB10501 DPA10401-DPB110501 DPA10401-DPB14901
KEPPFLWSGFELSPDKWTVQ

SEQ ID NO: 6253 - protein, 14 aa, synthetic construct
  source 1..14: note = Seed: PPFLWMGYELHPDK; note = HLAs: DRB1_1001 DPA10103-DPB10101 DPA10103-DPB10201 DPA10103-DPB10202 DPA10103-DPB10401 DPA10103-DPB112601 DPA10103-DPB11501 DPA10103-DPB11601 DPA10103-DPB11901 DPA10103-DPB12301 DPA10103-DPB13101 DPA10103-DPB13401 DPA10103-DPB13901 DPA10103-DPB14001 DPA10103-DPB14101 DPA10103-DPB14801 DPA10103-DPB15001 DPA10103-DPB15901 DPA10104-DPB10101 DPA10104-DPB11501 DPA10105-DPB10101 DPA10105-DPB10401 DPA10105-DPB15001 DPA10106-DPB10101 DPA10201-DPB10101 DPA10201-DPB110601 DPA10201-DPB11501 DPA10201-DPB11601 DPA10201-DPB11901 DPA10202-DPB10101 DPA10202-DPB10201 DPA10202-DPB10202 DPA10202-DPB10401 DPA10202-DPB110601 DPA10202-DPB11901 DPA10202-DPB13101 DPA10202-DPB16501 DPA10301-DPB10101 DPA10301-DPB10201 DPA10301-DPB10202 DPA10301-DPB10401 DPA10301-DPB10402 DPA10301-DPB110501 DPA10301-DPB110601 DPA10301-DPB11801 DPA10301-DPB12301 DPA10301-DPB13901 DPA10301-DPB14001 DPA10301-DPB14901 DPA10301-DPB15501 DPA10301-DPB16501 DPA10301-DPB17501 DPA10301-DPB18001 DPA10401-DPB10101 DPA10401-DPB10201; note = HLAs: DPA10401-DPB10202 DPA10401-DPB10402 DPA10401-DPB10501 DPA10401-DPB110501 DPA10401-DPB14901
PPFLWSGFELSPDK

SEQ ID NO: 6254 - protein, 14 aa, synthetic construct
  source 1..14: note = Seed: PPFLWMGYELHPDK; note = HLAs: DRB1_1001 DPA10103-DPB10101 DPA10103-DPB10201 DPA10103-DPB10202 DPA10103-DPB10401 DPA10103-DPB112601 DPA10103-DPB11501 DPA10103-DPB11601 DPA10103-DPB11901 DPA10103-DPB12301 DPA10103-DPB13101 DPA10103-DPB13401 DPA10103-DPB13901 DPA10103-DPB14001 DPA10103-DPB14101 DPA10103-DPB14801 DPA10103-DPB15001 DPA10103-DPB15901 DPA10104-DPB10101 DPA10104-DPB11501 DPA10105-DPB10101 DPA10105-DPB10401 DPA10105-DPB15001 DPA10106-DPB10101 DPA10201-DPB10101 DPA10201-DPB110601 DPA10201-DPB11501 DPA10201-DPB11601 DPA10201-DPB11901 DPA10202-DPB10101 DPA10202-DPB10201 DPA10202-DPB10202 DPA10202-DPB10401 DPA10202-DPB110601 DPA10202-DPB11901 DPA10202-DPB13101 DPA10202-DPB16501 DPA10301-DPB10101 DPA10301-DPB10201 DPA10301-DPB10202 DPA10301-DPB10401 DPA10301-DPB10402 DPA10301-DPB110501 DPA10301-DPB110601 DPA10301-DPB11801 DPA10301-DPB12301 DPA10301-DPB13901 DPA10301-DPB14001 DPA10301-DPB14901 DPA10301-DPB15501 DPA10301-DPB16501 DPA10301-DPB17501 DPA10301-DPB18001 DPA10401-DPB10101 DPA10401-DPB10201; note = HLAs: DPA10401-DPB10202 DPA10401-DPB10402 DPA10401-DPB10501 DPA10401-DPB110501 DPA10401-DPB14901
PPFLWIGFELMPDK

SEQ ID NO: 6255 - protein, 20 aa, synthetic construct
  source 1..20: note = Seed: KEPPFLWMGYELHPDKWTVQ; note = HLAs: DRB1_0101 DPA10103-DPB10101 DPA10103-DPB10201 DPA10103-DPB10202 DPA10103-DPB10401 DPA10103-DPB10402 DPA10103-DPB10501 DPA10103-DPB110501 DPA10103-DPB112601 DPA10103-DPB11501 DPA10103-DPB11601 DPA10103-DPB11801 DPA10103-DPB11901 DPA10103-DPB12301 DPA10103-DPB13101 DPA10103-DPB13401 DPA10103-DPB13901 DPA10103-DPB14001 DPA10103-DPB14101 DPA10103-DPB14801 DPA10103-DPB14901 DPA10103-DPB15001 DPA10103-DPB15101 DPA10103-DPB15501 DPA10103-DPB15901 DPA10103-DPB18001 DPA10104-DPB10101 DPA10104-DPB11501 DPA10105-DPB10101 DPA10105-DPB10401 DPA10105-DPB11801 DPA10105-DPB15001 DPA10106-DPB10101 DPA10201-DPB10101 DPA10201-DPB10201 DPA10201-DPB10202 DPA10201-DPB10401 DPA10201-DPB10501 DPA10201-DPB110601 DPA10201-DPB11501 DPA10201-DPB11601 DPA10201-DPB11901 DPA10201-DPB13401 DPA10201-DPB15501 DPA10202-DPB10101 DPA10202-DPB10201 DPA10202-DPB10202 DPA10202-DPB10401 DPA10202-DPB10501 DPA10202-DPB110601 DPA10202-DPB11101 DPA10202-DPB11301 DPA10202-DPB11801 DPA10202-DPB11901 DPA10202-DPB13101; note = HLAs: DPA10202-DPB13801 DPA10202-DPB15501 DPA10202-DPB16501 DPA10301-DPB10101 DPA10301-DPB10201 DPA10301-DPB10202 DPA10301-DPB10401 DPA10301-DPB10402 DPA10301-DPB110501 DPA10301-DPB110601 DPA10301-DPB11101 DPA10301-DPB11301 DPA10301-DPB11801 DPA10301-DPB12301 DPA10301-DPB13901 DPA10301-DPB14001 DPA10301-DPB14901 DPA10301-DPB15501 DPA10301-DPB16501 DPA10301-DPB17501 DPA10301-DPB18001 DPA10401-DPB10101 DPA10401-DPB10201 DPA10401-DPB10202 DPA10401-DPB10402 DPA10401-DPB10501 DPA10401-DPB110501 DPA10401-DPB14901
KEPPFLWSGYELLPDKWTVQ

SEQ ID NO: 6256 - protein, 20 aa, synthetic construct
  source 1..20: note = Seed: KEPPFLWMGYELHPDKWTVQ; note = HLAs: DRB1_0101 DPA10103-DPB10101 DPA10103-DPB10201 DPA10103-DPB10202 DPA10103-DPB10401 DPA10103-DPB10402 DPA10103-DPB10501 DPA10103-DPB110501 DPA10103-DPB112601 DPA10103-DPB11501 DPA10103-DPB11601 DPA10103-DPB11801 DPA10103-DPB11901 DPA10103-DPB12301 DPA10103-DPB13101 DPA10103-DPB13401 DPA10103-DPB13901 DPA10103-DPB14001 DPA10103-DPB14101 DPA10103-DPB14801 DPA10103-DPB14901 DPA10103-DPB15001 DPA10103-DPB15101 DPA10103-DPB15501 DPA10103-DPB15901 DPA10103-DPB18001 DPA10104-DPB10101 DPA10104-DPB11501 DPA10105-DPB10101 DPA10105-DPB10401 DPA10105-DPB11801 DPA10105-DPB15001 DPA10106-DPB10101 DPA10201-DPB10101 DPA10201-DPB10201 DPA10201-DPB10202 DPA10201-DPB10401 DPA10201-DPB10501 DPA10201-DPB110601 DPA10201-DPB11501 DPA10201-DPB11601 DPA10201-DPB11901 DPA10201-DPB13401 DPA10201-DPB15501 DPA10202-DPB10101 DPA10202-DPB10201 DPA10202-DPB10202 DPA10202-DPB10401 DPA10202-DPB10501 DPA10202-DPB110601 DPA10202-DPB11101 DPA10202-DPB11301 DPA10202-DPB11801 DPA10202-DPB11901 DPA10202-DPB13101; note = HLAs: DPA10202-DPB13801 DPA10202-DPB15501 DPA10202-DPB16501 DPA10301-DPB10101 DPA10301-DPB10201 DPA10301-DPB10202 DPA10301-DPB10401 DPA10301-DPB10402 DPA10301-DPB110501 DPA10301-DPB110601 DPA10301-DPB11101 DPA10301-DPB11301 DPA10301-DPB11801 DPA10301-DPB12301 DPA10301-DPB13901 DPA10301-DPB14001 DPA10301-DPB14901 DPA10301-DPB15501 DPA10301-DPB16501 DPA10301-DPB17501 DPA10301-DPB18001 DPA10401-DPB10101 DPA10401-DPB10201 DPA10401-DPB10202 DPA10401-DPB10402 DPA10401-DPB10501 DPA10401-DPB110501 DPA10401-DPB14901
KEPPFLWSGYELIPDKWTVQ

SEQ ID NO: 6257 - protein, 14 aa, synthetic construct
  source 1..14: note = Seed: PPFLWMGYELHPDK; note = HLAs: DPA10103-DPB10101 DPA10103-DPB10201 DPA10103-DPB10202 DPA10103-DPB10401 DPA10103-DPB112601 DPA10103-DPB11501 DPA10103-DPB11601 DPA10103-DPB11901 DPA10103-DPB12301 DPA10103-DPB13101 DPA10103-DPB13401 DPA10103-DPB13901 DPA10103-DPB14001 DPA10103-DPB14101 DPA10103-DPB14801 DPA10103-DPB15001 DPA10103-DPB15901 DPA10104-DPB10101 DPA10104-DPB11501 DPA10105-DPB10101 DPA10105-DPB10401 DPA10105-DPB15001 DPA10106-DPB10101 DPA10201-DPB10101 DPA10201-DPB110601 DPA10201-DPB11501 DPA10201-DPB11601 DPA10201-DPB11901 DPA10202-DPB10101 DPA10202-DPB10201 DPA10202-DPB10202 DPA10202-DPB10401 DPA10202-DPB110601 DPA10202-DPB11901 DPA10202-DPB13101 DPA10202-DPB16501 DPA10301-DPB10101 DPA10301-DPB10201 DPA10301-DPB10202 DPA10301-DPB10401 DPA10301-DPB10402 DPA10301-DPB110501 DPA10301-DPB110601 DPA10301-DPB11801 DPA10301-DPB12301 DPA10301-DPB13901 DPA10301-DPB14001 DPA10301-DPB14901 DPA10301-DPB15501 DPA10301-DPB16501 DPA10301-DPB17501 DPA10301-DPB18001 DPA10401-DPB10101 DPA10401-DPB10201; note = HLAs: DPA10401-DPB10202 DPA10401-DPB10402 DPA10401-DPB10501 DPA10401-DPB110501 DPA10401-DPB14901
PPILWSGFELVPDK

SEQ ID NO: 6258 - protein, 14 aa, synthetic construct
  source 1..14: note = Seed: PPFLWMGYELHPDK; note = HLAs: DPA10103-DPB10101 DPA10103-DPB10201 DPA10103-DPB10202 DPA10103-DPB10401 DPA10103-DPB112601 DPA10103-DPB11501 DPA10103-DPB11601 DPA10103-DPB11901 DPA10103-DPB12301 DPA10103-DPB13101 DPA10103-DPB13401 DPA10103-DPB13901 DPA10103-DPB14001 DPA10103-DPB14101 DPA10103-DPB14801 DPA10103-DPB15001 DPA10103-DPB15901 DPA10104-DPB10101 DPA10104-DPB11501 DPA10105-DPB10101 DPA10105-DPB10401 DPA10105-DPB15001 DPA10106-DPB10101 DPA10201-DPB10101 DPA10201-DPB110601 DPA10201-DPB11501 DPA10201-DPB11601 DPA10201-DPB11901 DPA10202-DPB10101 DPA10202-DPB10201 DPA10202-DPB10202 DPA10202-DPB10401 DPA10202-DPB110601 DPA10202-DPB11901 DPA10202-DPB13101 DPA10202-DPB16501 DPA10301-DPB10101 DPA10301-DPB10201 DPA10301-DPB10202 DPA10301-DPB10401 DPA10301-DPB10402 DPA10301-DPB110501 DPA10301-DPB110601 DPA10301-DPB11801 DPA10301-DPB12301 DPA10301-DPB13901 DPA10301-DPB14001 DPA10301-DPB14901 DPA10301-DPB15501 DPA10301-DPB16501 DPA10301-DPB17501 DPA10301-DPB18001 DPA10401-DPB10101 DPA10401-DPB10201; note = HLAs: DPA10401-DPB10202 DPA10401-DPB10402 DPA10401-DPB10501 DPA10401-DPB110501 DPA10401-DPB14901
PPFLWKGFELLPDK

SEQ ID NO: 6259 - protein, 14 aa, synthetic construct
  source 1..14: note = Seed: PPFLWMGYELHPDK; note = HLAs: DPA10103-DPB10101 DPA10103-DPB10201 DPA10103-DPB10202 DPA10103-DPB10401 DPA10103-DPB112601 DPA10103-DPB11501 DPA10103-DPB11601 DPA10103-DPB11901 DPA10103-DPB12301 DPA10103-DPB13101 DPA10103-DPB13401 DPA10103-DPB13901 DPA10103-DPB14001 DPA10103-DPB14101 DPA10103-DPB14801 DPA10103-DPB15001 DPA10103-DPB15901 DPA10104-DPB10101 DPA10104-DPB11501 DPA10105-DPB10101 DPA10105-DPB10401 DPA10105-DPB15001 DPA10106-DPB10101 DPA10201-DPB10101 DPA10201-DPB110601 DPA10201-DPB11501 DPA10201-DPB11601 DPA10201-DPB11901 DPA10202-DPB10101 DPA10202-DPB10201 DPA10202-DPB10202 DPA10202-DPB10401 DPA10202-DPB110601 DPA10202-DPB11901 DPA10202-DPB13101 DPA10202-DPB16501 DPA10301-DPB10101 DPA10301-DPB10201 DPA10301-DPB10202 DPA10301-DPB10401 DPA10301-DPB10402 DPA10301-DPB110501 DPA10301-DPB110601 DPA10301-DPB11801 DPA10301-DPB12301 DPA10301-DPB13901 DPA10301-DPB14001 DPA10301-DPB14901 DPA10301-DPB15501 DPA10301-DPB16501 DPA10301-DPB17501 DPA10301-DPB18001 DPA10401-DPB10101 DPA10401-DPB10201; note = HLAs: DPA10401-DPB10202 DPA10401-DPB10402 DPA10401-DPB10501 DPA10401-DPB110501 DPA10401-DPB14901
PPWLWSGFELLPDK

SEQ ID NO: 6260 - protein, 14 aa, synthetic construct
  source 1..14: note = Seed: PPFLWMGYELHPDK; note = HLAs: DPA10103-DPB10101 DPA10103-DPB10201 DPA10103-DPB10202 DPA10103-DPB10401 DPA10103-DPB112601 DPA10103-DPB11501 DPA10103-DPB11601 DPA10103-DPB11901 DPA10103-DPB12301 DPA10103-DPB13101 DPA10103-DPB13401 DPA10103-DPB13901 DPA10103-DPB14001 DPA10103-DPB14101 DPA10103-DPB14801 DPA10103-DPB15001 DPA10103-DPB15901 DPA10104-DPB10101 DPA10104-DPB11501 DPA10105-DPB10101 DPA10105-DPB10401 DPA10105-DPB15001 DPA10106-DPB10101 DPA10201-DPB10101 DPA10201-DPB110601 DPA10201-DPB11501 DPA10201-DPB11601 DPA10201-DPB11901 DPA10202-DPB10101 DPA10202-DPB10201 DPA10202-DPB10202 DPA10202-DPB10401 DPA10202-DPB110601 DPA10202-DPB11901 DPA10202-DPB13101 DPA10202-DPB16501 DPA10301-DPB10101 DPA10301-DPB10201 DPA10301-DPB10202 DPA10301-DPB10401 DPA10301-DPB10402 DPA10301-DPB110501 DPA10301-DPB110601 DPA10301-DPB11801 DPA10301-DPB12301 DPA10301-DPB13901 DPA10301-DPB14001 DPA10301-DPB14901 DPA10301-DPB15501 DPA10301-DPB16501 DPA10301-DPB17501 DPA10301-DPB18001 DPA10401-DPB10101 DPA10401-DPB10201; note = HLAs: DPA10401-DPB10202 DPA10401-DPB10402 DPA10401-DPB10501 DPA10401-DPB110501 DPA10401-DPB14901
PPFLWSGYELIPDK

SEQ ID NO: 6261 - protein, 14 aa, synthetic construct
  source 1..14: note = Seed: PPFLWMGYELHPDK; note = HLAs: DPA10103-DPB10101 DPA10103-DPB10201 DPA10103-DPB10202 DPA10103-DPB10401 DPA10103-DPB112601 DPA10103-DPB11501 DPA10103-DPB11601 DPA10103-DPB11901 DPA10103-DPB12301 DPA10103-DPB13101 DPA10103-DPB13401 DPA10103-DPB13901 DPA10103-DPB14001 DPA10103-DPB14101 DPA10103-DPB14801 DPA10103-DPB15001 DPA10103-DPB15901 DPA10104-DPB10101 DPA10104-DPB11501 DPA10105-DPB10101 DPA10105-DPB10401 DPA10105-DPB15001 DPA10106-DPB10101 DPA10201-DPB10101 DPA10201-DPB110601 DPA10201-DPB11501 DPA10201-DPB11601 DPA10201-DPB11901 DPA10202-DPB10101 DPA10202-DPB10201 DPA10202-DPB10202 DPA10202-DPB10401 DPA10202-DPB110601 DPA10202-DPB11901 DPA10202-DPB13101 DPA10202-DPB16501 DPA10301-DPB10101 DPA10301-DPB10201 DPA10301-DPB10202 DPA10301-DPB10401 DPA10301-DPB10402 DPA10301-DPB110501 DPA10301-DPB110601 DPA10301-DPB11801 DPA10301-DPB12301 DPA10301-DPB13901 DPA10301-DPB14001 DPA10301-DPB14901 DPA10301-DPB15501 DPA10301-DPB16501 DPA10301-DPB17501 DPA10301-DPB18001 DPA10401-DPB10101 DPA10401-DPB10201; note = HLAs: DPA10401-DPB10202 DPA10401-DPB10402 DPA10401-DPB10501 DPA10401-DPB110501 DPA10401-DPB14901
PPFLWEGFELFPDK

SEQ ID NO: 6262 - protein, 14 aa, synthetic construct
  source 1..14: note = Seed: PPFLWMGYELHPDK; note = HLAs: DPA10103-DPB10101 DPA10103-DPB10201 DPA10103-DPB10202 DPA10103-DPB10401 DPA10103-DPB112601 DPA10103-DPB11501 DPA10103-DPB11601 DPA10103-DPB11901 DPA10103-DPB12301 DPA10103-DPB13101 DPA10103-DPB13401 DPA10103-DPB13901 DPA10103-DPB14001 DPA10103-DPB14101 DPA10103-DPB14801 DPA10103-DPB15001 DPA10103-DPB15901 DPA10104-DPB10101 DPA10104-DPB11501 DPA10105-DPB10101 DPA10105-DPB10401 DPA10105-DPB15001 DPA10106-DPB10101 DPA10201-DPB10101 DPA10201-DPB110601 DPA10201-DPB11501 DPA10201-DPB11601 DPA10201-DPB11901 DPA10202-DPB10101 DPA10202-DPB10201 DPA10202-DPB10202 DPA10202-DPB10401 DPA10202-DPB110601 DPA10202-DPB11901 DPA10202-DPB13101 DPA10202-DPB16501 DPA10301-DPB10101 DPA10301-DPB10201 DPA10301-DPB10202 DPA10301-DPB10401 DPA10301-DPB10402 DPA10301-DPB110501 DPA10301-DPB110601 DPA10301-DPB11801 DPA10301-DPB12301 DPA10301-DPB13901 DPA10301-DPB14001 DPA10301-DPB14901 DPA10301-DPB15501 DPA10301-DPB16501 DPA10301-DPB17501 DPA10301-DPB18001 DPA10401-DPB10101 DPA10401-DPB10201; note = HLAs: DPA10401-DPB10202 DPA10401-DPB10402 DPA10401-DPB10501 DPA10401-DPB110501 DPA10401-DPB14901
PPWLWTGFELVPDK

SEQ ID NO: 6263 - protein, 14 aa, synthetic construct
  source 1..14: note = Seed: PPFLWMGYELHPDK; note = HLAs: DRB1_1001 DPA10103-DPB10101 DPA10103-DPB10201 DPA10103-DPB10202 DPA10103-DPB10401 DPA10103-DPB112601 DPA10103-DPB11501 DPA10103-DPB11601 DPA10103-DPB11901 DPA10103-DPB12301 DPA10103-DPB13101 DPA10103-DPB13401 DPA10103-DPB13901 DPA10103-DPB14001 DPA10103-DPB14101 DPA10103-DPB14801 DPA10103-DPB15001 DPA10103-DPB15901 DPA10104-DPB10101 DPA10104-DPB11501 DPA10105-DPB10101 DPA10105-DPB10401 DPA10105-DPB15001 DPA10106-DPB10101 DPA10201-DPB10101 DPA10201-DPB110601 DPA10201-DPB11501 DPA10201-DPB11601 DPA10201-DPB11901 DPA10202-DPB10101 DPA10202-DPB10201 DPA10202-DPB10202 DPA10202-DPB10401 DPA10202-DPB110601 DPA10202-DPB11901 DPA10202-DPB13101 DPA10202-DPB16501 DPA10301-DPB10101 DPA10301-DPB10201 DPA10301-DPB10202 DPA10301-DPB10401 DPA10301-DPB10402 DPA10301-DPB110501 DPA10301-DPB110601 DPA10301-DPB11801 DPA10301-DPB12301 DPA10301-DPB13901 DPA10301-DPB14001 DPA10301-DPB14901 DPA10301-DPB15501 DPA10301-DPB16501 DPA10301-DPB17501 DPA10301-DPB18001 DPA10401-DPB10101 DPA10401-DPB10201; note = HLAs: DPA10401-DPB10202 DPA10401-DPB10402 DPA10401-DPB10501 DPA10401-DPB110501 DPA10401-DPB14901
PPFLWMGFELLPDK

SEQ ID NO: 6264 - protein, 14 aa, synthetic construct
  source 1..14: note = Seed: PPFLWMGYELHPDK; note = HLAs: DRB1_1001 DPA10103-DPB10101 DPA10103-DPB10201 DPA10103-DPB10202 DPA10103-DPB10401 DPA10103-DPB112601 DPA10103-DPB11501 DPA10103-DPB11601 DPA10103-DPB11901 DPA10103-DPB12301 DPA10103-DPB13101 DPA10103-DPB13401 DPA10103-DPB13901 DPA10103-DPB14001 DPA10103-DPB14101 DPA10103-DPB14801 DPA10103-DPB15001 DPA10103-DPB15901 DPA10104-DPB10101 DPA10104-DPB11501 DPA10105-DPB10101 DPA10105-DPB10401 DPA10105-DPB15001 DPA10106-DPB10101 DPA10201-DPB10101 DPA10201-DPB110601 DPA10201-DPB11501 DPA10201-DPB11601 DPA10201-DPB11901 DPA10202-DPB10101 DPA10202-DPB10201 DPA10202-DPB10202 DPA10202-DPB10401 DPA10202-DPB110601 DPA10202-DPB11901 DPA10202-DPB13101 DPA10202-DPB16501 DPA10301-DPB10101 DPA10301-DPB10201 DPA10301-DPB10202 DPA10301-DPB10401 DPA10301-DPB10402 DPA10301-DPB110501 DPA10301-DPB110601 DPA10301-DPB11801 DPA10301-DPB12301 DPA10301-DPB13901 DPA10301-DPB14001 DPA10301-DPB14901 DPA10301-DPB15501 DPA10301-DPB16501 DPA10301-DPB17501 DPA10301-DPB18001 DPA10401-DPB10101 DPA10401-DPB10201; note = HLAs: DPA10401-DPB10202 DPA10401-DPB10402 DPA10401-DPB10501 DPA10401-DPB110501 DPA10401-DPB14901
PPFLWEGFELMPDK

SEQ ID NO: 6265 - protein, 20 aa, synthetic construct
  source 1..20: note = Seed: KEPPFLWMGYELHPDKWTVQ; note = HLAs: DRB1_0101 DPA10103-DPB10101 DPA10103-DPB10201 DPA10103-DPB10202 DPA10103-DPB10401 DPA10103-DPB10402 DPA10103-DPB10501 DPA10103-DPB110501 DPA10103-DPB112601 DPA10103-DPB11501 DPA10103-DPB11601 DPA10103-DPB11801 DPA10103-DPB11901 DPA10103-DPB12301 DPA10103-DPB13101 DPA10103-DPB13401 DPA10103-DPB13901 DPA10103-DPB14001 DPA10103-DPB14101 DPA10103-DPB14801 DPA10103-DPB14901 DPA10103-DPB15001 DPA10103-DPB15101 DPA10103-DPB15501 DPA10103-DPB15901 DPA10103-DPB18001 DPA10104-DPB10101 DPA10104-DPB11501 DPA10105-DPB10101 DPA10105-DPB10401 DPA10105-DPB11801 DPA10105-DPB15001 DPA10106-DPB10101 DPA10201-DPB10101 DPA10201-DPB10201 DPA10201-DPB10202 DPA10201-DPB10401 DPA10201-DPB10501 DPA10201-DPB110601 DPA10201-DPB11501 DPA10201-DPB11601 DPA10201-DPB11901 DPA10201-DPB13401 DPA10201-DPB15501 DPA10202-DPB10101 DPA10202-DPB10201 DPA10202-DPB10202 DPA10202-DPB10401 DPA10202-DPB10501 DPA10202-DPB110601 DPA10202-DPB11101 DPA10202-DPB11301 DPA10202-DPB11801 DPA10202-DPB11901 DPA10202-DPB13101; note = HLAs: DPA10202-DPB13801 DPA10202-DPB15501 DPA10202-DPB16501 DPA10301-DPB10101 DPA10301-DPB10201 DPA10301-DPB10202 DPA10301-DPB10401 DPA10301-DPB10402 DPA10301-DPB110501 DPA10301-DPB110601 DPA10301-DPB11101 DPA10301-DPB11301 DPA10301-DPB11801 DPA10301-DPB12301 DPA10301-DPB13901 DPA10301-DPB14001 DPA10301-DPB14901 DPA10301-DPB15501 DPA10301-DPB16501 DPA10301-DPB17501 DPA10301-DPB18001 DPA10401-DPB10101 DPA10401-DPB10201 DPA10401-DPB10202 DPA10401-DPB10402 DPA10401-DPB10501 DPA10401-DPB110501 DPA10401-DPB14901
KEPPLLWSGFELVPDKWTVQ

SEQ ID NO: 6266 - protein, 20 aa, synthetic construct
  source 1..20: note = Seed: KEPPFLWMGYELHPDKWTVQ; note = HLAs: DRB1_0101 DRB1_1001 DPA10103-DPB10101 DPA10103-DPB10201 DPA10103-DPB10202 DPA10103-DPB10401 DPA10103-DPB10402 DPA10103-DPB10501 DPA10103-DPB110501 DPA10103-DPB112601 DPA10103-DPB11501 DPA10103-DPB11601 DPA10103-DPB11801 DPA10103-DPB11901 DPA10103-DPB12301 DPA10103-DPB13101 DPA10103-DPB13401 DPA10103-DPB13901 DPA10103-DPB14001 DPA10103-DPB14101 DPA10103-DPB14801 DPA10103-DPB14901 DPA10103-DPB15001 DPA10103-DPB15101 DPA10103-DPB15501 DPA10103-DPB15901 DPA10103-DPB18001 DPA10104-DPB10101 DPA10104-DPB11501 DPA10105-DPB10101 DPA10105-DPB10401 DPA10105-DPB11801 DPA10105-DPB15001 DPA10106-DPB10101 DPA10201-DPB10101 DPA10201-DPB10201 DPA10201-DPB10202 DPA10201-DPB10401 DPA10201-DPB10501 DPA10201-DPB110601 DPA10201-DPB11501 DPA10201-DPB11601 DPA10201-DPB11901 DPA10201-DPB13401 DPA10201-DPB15501 DPA10202-DPB10101 DPA10202-DPB10201 DPA10202-DPB10202 DPA10202-DPB10401 DPA10202-DPB10501 DPA10202-DPB110601 DPA10202-DPB11101 DPA10202-DPB11301 DPA10202-DPB11801 DPA10202-DPB11901; note = HLAs: DPA10202-DPB13101 DPA10202-DPB13801 DPA10202-DPB15501 DPA10202-DPB16501 DPA10301-DPB10101 DPA10301-DPB10201 DPA10301-DPB10202 DPA10301-DPB10401 DPA10301-DPB10402 DPA10301-DPB110501 DPA10301-DPB110601 DPA10301-DPB11101 DPA10301-DPB11301 DPA10301-DPB11801 DPA10301-DPB12301 DPA10301-DPB13901 DPA10301-DPB14001 DPA10301-DPB14901 DPA10301-DPB15501 DPA10301-DPB16501 DPA10301-DPB17501 DPA10301-DPB18001 DPA10401-DPB10101 DPA10401-DPB10201 DPA10401-DPB10202 DPA10401-DPB10402 DPA10401-DPB10501 DPA10401-DPB110501 DPA10401-DPB14901
KEPPFLWTGFELNPDKWTVQ

SEQ ID NO: 6267 - protein, 14 aa, synthetic construct
  source 1..14: note = Seed: PPFLWMGYELHPDK; note = HLAs: DPA10103-DPB10101 DPA10103-DPB10201 DPA10103-DPB10202 DPA10103-DPB10401 DPA10103-DPB112601 DPA10103-DPB11501 DPA10103-DPB11601 DPA10103-DPB11901 DPA10103-DPB12301 DPA10103-DPB13101 DPA10103-DPB13401 DPA10103-DPB13901 DPA10103-DPB14001 DPA10103-DPB14101 DPA10103-DPB14801 DPA10103-DPB15001 DPA10103-DPB15901 DPA10104-DPB10101 DPA10104-DPB11501 DPA10105-DPB10101 DPA10105-DPB10401 DPA10105-DPB15001 DPA10106-DPB10101 DPA10201-DPB10101 DPA10201-DPB110601 DPA10201-DPB11501 DPA10201-DPB11601 DPA10201-DPB11901 DPA10202-DPB10101 DPA10202-DPB10201 DPA10202-DPB10202 DPA10202-DPB10401 DPA10202-DPB110601 DPA10202-DPB11901 DPA10202-DPB13101 DPA10202-DPB16501 DPA10301-DPB10101 DPA10301-DPB10201 DPA10301-DPB10202 DPA10301-DPB10401 DPA10301-DPB10402 DPA10301-DPB110501 DPA10301-DPB110601 DPA10301-DPB11801 DPA10301-DPB12301 DPA10301-DPB13901 DPA10301-DPB14001 DPA10301-DPB14901 DPA10301-DPB15501 DPA10301-DPB16501 DPA10301-DPB17501 DPA10301-DPB18001 DPA10401-DPB10101 DPA10401-DPB10201; note = HLAs: DPA10401-DPB10202 DPA10401-DPB10402 DPA10401-DPB10501 DPA10401-DPB110501 DPA10401-DPB14901
PPWLWSGFELVPDK

SEQ ID NO: 6268 - protein, 14 aa, synthetic construct
  source 1..14: note = Seed: PPFLWMGYELHPDK; note = HLAs: DRB1_1001 DPA10103-DPB10101 DPA10103-DPB10201 DPA10103-DPB10202 DPA10103-DPB10401 DPA10103-DPB112601 DPA10103-DPB11501 DPA10103-DPB11601 DPA10103-DPB11901 DPA10103-DPB12301 DPA10103-DPB13101 DPA10103-DPB13401 DPA10103-DPB13901 DPA10103-DPB14001 DPA10103-DPB14101 DPA10103-DPB14801 DPA10103-DPB15001 DPA10103-DPB15901 DPA10104-DPB10101 DPA10104-DPB11501 DPA10105-DPB10101 DPA10105-DPB10401 DPA10105-DPB15001 DPA10106-DPB10101 DPA10201-DPB10101 DPA10201-DPB110601 DPA10201-DPB11501 DPA10201-DPB11601 DPA10201-DPB11901 DPA10202-DPB10101 DPA10202-DPB10201 DPA10202-DPB10202 DPA10202-DPB10401 DPA10202-DPB110601 DPA10202-DPB11901 DPA10202-DPB13101 DPA10202-DPB16501 DPA10301-DPB10101 DPA10301-DPB10201 DPA10301-DPB10202 DPA10301-DPB10401 DPA10301-DPB10402 DPA10301-DPB110501 DPA10301-DPB110601 DPA10301-DPB11801 DPA10301-DPB12301 DPA10301-DPB13901 DPA10301-DPB14001 DPA10301-DPB14901 DPA10301-DPB15501 DPA10301-DPB16501 DPA10301-DPB17501 DPA10301-DPB18001 DPA10401-DPB10101 DPA10401-DPB10201; note = HLAs: DPA10401-DPB10202 DPA10401-DPB10402 DPA10401-DPB10501 DPA10401-DPB110501 DPA10401-DPB14901
PPFLWSGYELVPDK

SEQ ID NO: 6269 - protein, 20 aa, synthetic construct
  source 1..20: note = Seed: KEPPFLWMGYELHPDKWTVQ; note = HLAs: DRB1_0101 DRB1_1001 DPA10103-DPB10101 DPA10103-DPB10201 DPA10103-DPB10202 DPA10103-DPB10401 DPA10103-DPB10402 DPA10103-DPB10501 DPA10103-DPB110501 DPA10103-DPB112601 DPA10103-DPB11501 DPA10103-DPB11601 DPA10103-DPB11801 DPA10103-DPB11901 DPA10103-DPB12301 DPA10103-DPB13101 DPA10103-DPB13401 DPA10103-DPB13901 DPA10103-DPB14001 DPA10103-DPB14101 DPA10103-DPB14801 DPA10103-DPB14901 DPA10103-DPB15001 DPA10103-DPB15101 DPA10103-DPB15501 DPA10103-DPB15901 DPA10103-DPB18001 DPA10104-DPB10101 DPA10104-DPB11501 DPA10105-DPB10101 DPA10105-DPB10401 DPA10105-DPB11801 DPA10105-DPB15001 DPA10106-DPB10101 DPA10201-DPB10101 DPA10201-DPB10201 DPA10201-DPB10202 DPA10201-DPB10401 DPA10201-DPB10501 DPA10201-DPB110601 DPA10201-DPB11501 DPA10201-DPB11601 DPA10201-DPB11901 DPA10201-DPB13401 DPA10201-DPB15501 DPA10202-DPB10101 DPA10202-DPB10201 DPA10202-DPB10202 DPA10202-DPB10401 DPA10202-DPB10501 DPA10202-DPB110601 DPA10202-DPB11101 DPA10202-DPB11301 DPA10202-DPB11801 DPA10202-DPB11901; note = HLAs: DPA10202-DPB13101 DPA10202-DPB13801 DPA10202-DPB15501 DPA10202-DPB16501 DPA10301-DPB10101 DPA10301-DPB10201 DPA10301-DPB10202 DPA10301-DPB10401 DPA10301-DPB10402 DPA10301-DPB110501 DPA10301-DPB110601 DPA10301-DPB11101 DPA10301-DPB11301 DPA10301-DPB11801 DPA10301-DPB12301 DPA10301-DPB13901 DPA10301-DPB14001 DPA10301-DPB14901 DPA10301-DPB15501 DPA10301-DPB16501 DPA10301-DPB17501 DPA10301-DPB18001 DPA10401-DPB10101 DPA10401-DPB10201 DPA10401-DPB10202 DPA10401-DPB10402 DPA10401-DPB10501 DPA10401-DPB110501 DPA10401-DPB14901
KEPPFLWSGFELNPDKWTVQ

SEQ ID NO: 6270 - protein, 14 aa, synthetic construct
  source 1..14: note = Seed: PPFLWMGYELHPDK; note = HLAs: DPA10103-DPB10101 DPA10103-DPB10201 DPA10103-DPB10202 DPA10103-DPB10401 DPA10103-DPB112601 DPA10103-DPB11501 DPA10103-DPB11601 DPA10103-DPB11901 DPA10103-DPB12301 DPA10103-DPB13101 DPA10103-DPB13401 DPA10103-DPB13901 DPA10103-DPB14001 DPA10103-DPB14101 DPA10103-DPB14801 DPA10103-DPB15001 DPA10103-DPB15901 DPA10104-DPB10101 DPA10104-DPB11501 DPA10105-DPB10101 DPA10105-DPB10401 DPA10105-DPB15001 DPA10106-DPB10101 DPA10201-DPB10101 DPA10201-DPB110601 DPA10201-DPB11501 DPA10201-DPB11601 DPA10201-DPB11901 DPA10202-DPB10101 DPA10202-DPB10201 DPA10202-DPB10202 DPA10202-DPB10401 DPA10202-DPB110601 DPA10202-DPB11901 DPA10202-DPB13101 DPA10202-DPB16501 DPA10301-DPB10101 DPA10301-DPB10201 DPA10301-DPB10202 DPA10301-DPB10401 DPA10301-DPB10402 DPA10301-DPB110501 DPA10301-DPB110601 DPA10301-DPB11801 DPA10301-DPB12301 DPA10301-DPB13901 DPA10301-DPB14001 DPA10301-DPB14901 DPA10301-DPB15501 DPA10301-DPB16501 DPA10301-DPB17501 DPA10301-DPB18001 DPA10401-DPB10101 DPA10401-DPB10201; note = HLAs: DPA10401-DPB10202 DPA10401-DPB10402 DPA10401-DPB10501 DPA10401-DPB110501 DPA10401-DPB14901
PPFLWTGWELLPDK

SEQ ID NO: 6271 - protein, 20 aa, synthetic construct
  source 1..20: note = Seed: KEPPFLWMGYELHPDKWTVQ; note = HLAs: DPA10103-DPB10101 DPA10103-DPB10201 DPA10103-DPB10202 DPA10103-DPB10401 DPA10103-DPB10402 DPA10103-DPB10501 DPA10103-DPB110501 DPA10103-DPB112601 DPA10103-DPB11501 DPA10103-DPB11601 DPA10103-DPB11801 DPA10103-DPB11901 DPA10103-DPB12301 DPA10103-DPB13101 DPA10103-DPB13401 DPA10103-DPB13901 DPA10103-DPB14001 DPA10103-DPB14101 DPA10103-DPB14801 DPA10103-DPB14901 DPA10103-DPB15001 DPA10103-DPB15101 DPA10103-DPB15501 DPA10103-DPB15901 DPA10103-DPB18001 DPA10104-DPB10101 DPA10104-DPB11501 DPA10105-DPB10101 DPA10105-DPB10401 DPA10105-DPB11801 DPA10105-DPB15001 DPA10106-DPB10101 DPA10201-DPB10101 DPA10201-DPB10201 DPA10201-DPB10202 DPA10201-DPB10401 DPA10201-DPB10501 DPA10201-DPB110601 DPA10201-DPB11501 DPA10201-DPB11601 DPA10201-DPB11901 DPA10201-DPB13401 DPA10201-DPB15501 DPA10202-DPB10101 DPA10202-DPB10201 DPA10202-DPB10202 DPA10202-DPB10401 DPA10202-DPB10501 DPA10202-DPB110601 DPA10202-DPB11101 DPA10202-DPB11301 DPA10202-DPB11801 DPA10202-DPB11901 DPA10202-DPB13101 DPA10202-DPB13801; note = HLAs: DPA10202-DPB15501 DPA10202-DPB16501 DPA10301-DPB10101 DPA10301-DPB10201 DPA10301-DPB10202 DPA10301-DPB10401 DPA10301-DPB10402 DPA10301-DPB110501 DPA10301-DPB110601 DPA10301-DPB11101 DPA10301-DPB11301 DPA10301-DPB11801 DPA10301-DPB12301 DPA10301-DPB13901 DPA10301-DPB14001 DPA10301-DPB14901 DPA10301-DPB15501 DPA10301-DPB16501 DPA10301-DPB17501 DPA10301-DPB18001 DPA10401-DPB10101 DPA10401-DPB10201 DPA10401-DPB10202 DPA10401-DPB10402 DPA10401-DPB10501 DPA10401-DPB110501 DPA10401-DPB14901
KEPPLLWSGFELLPDKWTVQ

SEQ ID NO: 6272 - protein, 14 aa, synthetic construct
  source 1..14: note = Seed: PPFLWMGYELHPDK; note = HLAs: DRB1_1001 DPA10103-DPB10101 DPA10103-DPB10201 DPA10103-DPB10202 DPA10103-DPB10401 DPA10103-DPB112601 DPA10103-DPB11501 DPA10103-DPB11601 DPA10103-DPB11901 DPA10103-DPB12301 DPA10103-DPB13101 DPA10103-DPB13401 DPA10103-DPB13901 DPA10103-DPB14001 DPA10103-DPB14101 DPA10103-DPB14801 DPA10103-DPB15001 DPA10103-DPB15901 DPA10104-DPB10101 DPA10104-DPB11501 DPA10105-DPB10101 DPA10105-DPB10401 DPA10105-DPB15001 DPA10106-DPB10101 DPA10201-DPB10101 DPA10201-DPB110601 DPA10201-DPB11501 DPA10201-DPB11601 DPA10201-DPB11901 DPA10202-DPB10101 DPA10202-DPB10201 DPA10202-DPB10202 DPA10202-DPB10401 DPA10202-DPB110601 DPA10202-DPB11901 DPA10202-DPB13101 DPA10202-DPB16501 DPA10301-DPB10101 DPA10301-DPB10201 DPA10301-DPB10202 DPA10301-DPB10401 DPA10301-DPB10402 DPA10301-DPB110501 DPA10301-DPB110601 DPA10301-DPB11801 DPA10301-DPB12301 DPA10301-DPB13901 DPA10301-DPB14001 DPA10301-DPB14901 DPA10301-DPB15501 DPA10301-DPB16501 DPA10301-DPB17501 DPA10301-DPB18001 DPA10401-DPB10101 DPA10401-DPB10201; note = HLAs: DPA10401-DPB10202 DPA10401-DPB10402 DPA10401-DPB10501 DPA10401-DPB110501 DPA10401-DPB14901
PPFLWMGFELVPDK

SEQ ID NO: 6273 - protein, 14 aa, synthetic construct
  source 1..14: note = Seed: PPFLWMGYELHPDK; note = HLAs: DRB1_1001 DPA10103-DPB10101 DPA10103-DPB10201 DPA10103-DPB10202 DPA10103-DPB10401 DPA10103-DPB112601 DPA10103-DPB11501 DPA10103-DPB11601 DPA10103-DPB11901 DPA10103-DPB12301 DPA10103-DPB13101 DPA10103-DPB13401 DPA10103-DPB13901 DPA10103-DPB14001 DPA10103-DPB14101 DPA10103-DPB14801 DPA10103-DPB15001 DPA10103-DPB15901 DPA10104-DPB10101 DPA10104-DPB11501 DPA10105-DPB10101 DPA10105-DPB10401 DPA10105-DPB15001 DPA10106-DPB10101 DPA10201-DPB10101 DPA10201-DPB110601 DPA10201-DPB11501 DPA10201-DPB11601 DPA10201-DPB11901 DPA10202-DPB10101 DPA10202-DPB10201 DPA10202-DPB10202 DPA10202-DPB10401 DPA10202-DPB110601 DPA10202-DPB11901 DPA10202-DPB13101 DPA10202-DPB16501 DPA10301-DPB10101 DPA10301-DPB10201 DPA10301-DPB10202 DPA10301-DPB10401 DPA10301-DPB10402 DPA10301-DPB110501 DPA10301-DPB110601 DPA10301-DPB11801 DPA10301-DPB12301 DPA10301-DPB13901 DPA10301-DPB14001 DPA10301-DPB14901 DPA10301-DPB15501 DPA10301-DPB16501 DPA10301-DPB17501 DPA10301-DPB18001 DPA10401-DPB10101 DPA10401-DPB10201; note = HLAs: DPA10401-DPB10202 DPA10401-DPB10402 DPA10401-DPB10501 DPA10401-DPB110501 DPA10401-DPB14901
PPFLWLGFELLPDK

SEQ ID NO: 6274 - protein, 14 aa, synthetic construct
  source 1..14: note = Seed: PPFLWMGYELHPDK; note = HLAs: DRB1_1001 DPA10103-DPB10101 DPA10103-DPB10201 DPA10103-DPB10202 DPA10103-DPB10401 DPA10103-DPB112601 DPA10103-DPB11501 DPA10103-DPB11601 DPA10103-DPB11901 DPA10103-DPB12301 DPA10103-DPB13101 DPA10103-DPB13401 DPA10103-DPB13901 DPA10103-DPB14001 DPA10103-DPB14101 DPA10103-DPB14801 DPA10103-DPB15001 DPA10103-DPB15901 DPA10104-DPB10101 DPA10104-DPB11501 DPA10105-DPB10101 DPA10105-DPB10401 DPA10105-DPB15001 DPA10106-DPB10101 DPA10201-DPB10101 DPA10201-DPB110601 DPA10201-DPB11501 DPA10201-DPB11601 DPA10201-DPB11901 DPA10202-DPB10101 DPA10202-DPB10201 DPA10202-DPB10202 DPA10202-DPB10401 DPA10202-DPB110601 DPA10202-DPB11901 DPA10202-DPB13101 DPA10202-DPB16501 DPA10301-DPB10101 DPA10301-DPB10201 DPA10301-DPB10202 DPA10301-DPB10401 DPA10301-DPB10402 DPA10301-DPB110501 DPA10301-DPB110601 DPA10301-DPB11801 DPA10301-DPB12301 DPA10301-DPB13901 DPA10301-DPB14001 DPA10301-DPB14901 DPA10301-DPB15501 DPA10301-DPB16501 DPA10301-DPB17501 DPA10301-DPB18001 DPA10401-DPB10101 DPA10401-DPB10201; note = HLAs: DPA10401-DPB10202 DPA10401-DPB10402 DPA10401-DPB10501 DPA10401-DPB110501 DPA10401-DPB14901
PPFLWAGYELLPDK

SEQ ID NO: 6275 - protein, 20 aa, synthetic construct
  source 1..20: note = Seed: KEPPFLWMGYELHPDKWTVQ; note = HLAs: DPA10103-DPB10101 DPA10103-DPB10201 DPA10103-DPB10202 DPA10103-DPB10401 DPA10103-DPB10402 DPA10103-DPB10501 DPA10103-DPB110501 DPA10103-DPB112601 DPA10103-DPB11501 DPA10103-DPB11601 DPA10103-DPB11801 DPA10103-DPB11901 DPA10103-DPB12301 DPA10103-DPB13101 DPA10103-DPB13401 DPA10103-DPB13901 DPA10103-DPB14001 DPA10103-DPB14101 DPA10103-DPB14801 DPA10103-DPB14901 DPA10103-DPB15001 DPA10103-DPB15101 DPA10103-DPB15501 DPA10103-DPB15901 DPA10103-DPB18001 DPA10104-DPB10101 DPA10104-DPB11501 DPA10105-DPB10101 DPA10105-DPB10401 DPA10105-DPB11801 DPA10105-DPB15001 DPA10106-DPB10101 DPA10201-DPB10101 DPA10201-DPB10201 DPA10201-DPB10202 DPA10201-DPB10401 DPA10201-DPB10501 DPA10201-DPB110601 DPA10201-DPB11501 DPA10201-DPB11601 DPA10201-DPB11901 DPA10201-DPB13401 DPA10201-DPB15501 DPA10202-DPB10101 DPA10202-DPB10201 DPA10202-DPB10202 DPA10202-DPB10401 DPA10202-DPB10501 DPA10202-DPB110601 DPA10202-DPB11101 DPA10202-DPB11301 DPA10202-DPB11801 DPA10202-DPB11901 DPA10202-DPB13101 DPA10202-DPB13801; note = HLAs: DPA10202-DPB15501 DPA10202-DPB16501 DPA10301-DPB10101 DPA10301-DPB10201 DPA10301-DPB10202 DPA10301-DPB10401 DPA10301-DPB10402 DPA10301-DPB110501 DPA10301-DPB110601 DPA10301-DPB11101 DPA10301-DPB11301 DPA10301-DPB11801 DPA10301-DPB12301 DPA10301-DPB13901 DPA10301-DPB14001 DPA10301-DPB14901 DPA10301-DPB15501 DPA10301-DPB16501 DPA10301-DPB17501 DPA10301-DPB18001 DPA10401-DPB10101 DPA10401-DPB10201 DPA10401-DPB10202 DPA10401-DPB10402 DPA10401-DPB10501 DPA10401-DPB110501 DPA10401-DPB14901
KEPPLLWSGFELIPDKWTVQ

SEQ ID NO: 6276 - protein, 14 aa, synthetic construct
  source 1..14: note = Seed: PPFLWMGYELHPDK; note = HLAs: DRB1_1001 DPA10103-DPB10101 DPA10103-DPB10201 DPA10103-DPB10202 DPA10103-DPB10401 DPA10103-DPB112601 DPA10103-DPB11501 DPA10103-DPB11601 DPA10103-DPB11901 DPA10103-DPB12301 DPA10103-DPB13101 DPA10103-DPB13401 DPA10103-DPB13901 DPA10103-DPB14001 DPA10103-DPB14101 DPA10103-DPB14801 DPA10103-DPB15001 DPA10103-DPB15901 DPA10104-DPB10101 DPA10104-DPB11501 DPA10105-DPB10101 DPA10105-DPB10401 DPA10105-DPB15001 DPA10106-DPB10101 DPA10201-DPB10101 DPA10201-DPB110601 DPA10201-DPB11501 DPA10201-DPB11601 DPA10201-DPB11901 DPA10202-DPB10101 DPA10202-DPB10201 DPA10202-DPB10202 DPA10202-DPB10401 DPA10202-DPB110601 DPA10202-DPB11901 DPA10202-DPB13101 DPA10202-DPB16501 DPA10301-DPB10101 DPA10301-DPB10201 DPA10301-DPB10202 DPA10301-DPB10401 DPA10301-DPB10402 DPA10301-DPB110501 DPA10301-DPB110601 DPA10301-DPB11801 DPA10301-DPB12301 DPA10301-DPB13901 DPA10301-DPB14001 DPA10301-DPB14901 DPA10301-DPB15501 DPA10301-DPB16501 DPA10301-DPB17501 DPA10301-DPB18001 DPA10401-DPB10101 DPA10401-DPB10201; note = HLAs: DPA10401-DPB10202 DPA10401-DPB10402 DPA10401-DPB10501 DPA10401-DPB110501 DPA10401-DPB14901
PPFLWTGFELNPDK

SEQ ID NO: 6277 - protein, 20 aa, synthetic construct
  source 1..20: note = Seed: KEPPFLWMGYELHPDKWTVQ; note = HLAs: DRB1_0101 DPA10103-DPB10101 DPA10103-DPB10201 DPA10103-DPB10202 DPA10103-DPB10401 DPA10103-DPB10402 DPA10103-DPB10501 DPA10103-DPB110501 DPA10103-DPB112601 DPA10103-DPB11501 DPA10103-DPB11601 DPA10103-DPB11801 DPA10103-DPB11901 DPA10103-DPB12301 DPA10103-DPB13101 DPA10103-DPB13401 DPA10103-DPB13901 DPA10103-DPB14001 DPA10103-DPB14101 DPA10103-DPB14801 DPA10103-DPB14901 DPA10103-DPB15001 DPA10103-DPB15101 DPA10103-DPB15501 DPA10103-DPB15901 DPA10103-DPB18001 DPA10104-DPB10101 DPA10104-DPB11501 DPA10105-DPB10101 DPA10105-DPB10401 DPA10105-DPB11801 DPA10105-DPB15001 DPA10106-DPB10101 DPA10201-DPB10101 DPA10201-DPB10201 DPA10201-DPB10202 DPA10201-DPB10401 DPA10201-DPB10501 DPA10201-DPB110601 DPA10201-DPB11501 DPA10201-DPB11601 DPA10201-DPB11901 DPA10201-DPB13401 DPA10201-DPB15501 DPA10202-DPB10101 DPA10202-DPB10201 DPA10202-DPB10202 DPA10202-DPB10401 DPA10202-DPB10501 DPA10202-DPB110601 DPA10202-DPB11101 DPA10202-DPB11301 DPA10202-DPB11801 DPA10202-DPB11901 DPA10202-DPB13101; note = HLAs: DPA10202-DPB13801 DPA10202-DPB15501 DPA10202-DPB16501 DPA10301-DPB10101 DPA10301-DPB10201 DPA10301-DPB10202 DPA10301-DPB10401 DPA10301-DPB10402 DPA10301-DPB110501 DPA10301-DPB110601 DPA10301-DPB11101 DPA10301-DPB11301 DPA10301-DPB11801 DPA10301-DPB12301 DPA10301-DPB13901 DPA10301-DPB14001 DPA10301-DPB14901 DPA10301-DPB15501 DPA10301-DPB16501 DPA10301-DPB17501 DPA10301-DPB18001 DPA10401-DPB10101 DPA10401-DPB10201 DPA10401-DPB10202 DPA10401-DPB10402 DPA10401-DPB10501 DPA10401-DPB110501 DPA10401-DPB14901
KEPPLLWTGFELVPDKWTVQ

SEQ ID NO: 6278 - protein, 14 aa, synthetic construct
  source 1..14: note = Seed: PPFLWMGYELHPDK; note = HLAs: DPA10103-DPB10101 DPA10103-DPB10201 DPA10103-DPB10202 DPA10103-DPB10401 DPA10103-DPB112601 DPA10103-DPB11501 DPA10103-DPB11601 DPA10103-DPB11901 DPA10103-DPB12301 DPA10103-DPB13101 DPA10103-DPB13401 DPA10103-DPB13901 DPA10103-DPB14001 DPA10103-DPB14101 DPA10103-DPB14801 DPA10103-DPB15001 DPA10103-DPB15901 DPA10104-DPB10101 DPA10104-DPB11501 DPA10105-DPB10101 DPA10105-DPB10401 DPA10105-DPB15001 DPA10106-DPB10101 DPA10201-DPB10101 DPA10201-DPB110601 DPA10201-DPB11501 DPA10201-DPB11601 DPA10201-DPB11901 DPA10202-DPB10101 DPA10202-DPB10201 DPA10202-DPB10202 DPA10202-DPB10401 DPA10202-DPB110601 DPA10202-DPB11901 DPA10202-DPB13101 DPA10202-DPB16501 DPA10301-DPB10101 DPA10301-DPB10201 DPA10301-DPB10202 DPA10301-DPB10401 DPA10301-DPB10402 DPA10301-DPB110501 DPA10301-DPB110601 DPA10301-DPB11801 DPA10301-DPB12301 DPA10301-DPB13901 DPA10301-DPB14001 DPA10301-DPB14901 DPA10301-DPB15501 DPA10301-DPB16501 DPA10301-DPB17501 DPA10301-DPB18001 DPA10401-DPB10101 DPA10401-DPB10201; note = HLAs: DPA10401-DPB10202 DPA10401-DPB10402 DPA10401-DPB10501 DPA10401-DPB110501 DPA10401-DPB14901
PPFLWQGFELFPDK

SEQ ID NO: 6279 - protein, 14 aa, synthetic construct
  source 1..14: note = Seed: PPFLWMGYELHPDK; note = HLAs: DRB1_1001 DPA10103-DPB10101 DPA10103-DPB10201 DPA10103-DPB10202 DPA10103-DPB10401 DPA10103-DPB112601 DPA10103-DPB11501 DPA10103-DPB11601 DPA10103-DPB11901 DPA10103-DPB12301 DPA10103-DPB13101 DPA10103-DPB13401 DPA10103-DPB13901 DPA10103-DPB14001 DPA10103-DPB14101 DPA10103-DPB14801 DPA10103-DPB15001 DPA10103-DPB15901 DPA10104-DPB10101 DPA10104-DPB11501 DPA10105-DPB10101 DPA10105-DPB10401 DPA10105-DPB15001 DPA10106-DPB10101 DPA10201-DPB10101 DPA10201-DPB110601 DPA10201-DPB11501 DPA10201-DPB11601 DPA10201-DPB11901 DPA10202-DPB10101 DPA10202-DPB10201 DPA10202-DPB10202 DPA10202-DPB10401 DPA10202-DPB110601 DPA10202-DPB11901 DPA10202-DPB13101 DPA10202-DPB16501 DPA10301-DPB10101 DPA10301-DPB10201 DPA10301-DPB10202 DPA10301-DPB10401 DPA10301-DPB10402 DPA10301-DPB110501 DPA10301-DPB110601 DPA10301-DPB11801 DPA10301-DPB12301 DPA10301-DPB13901 DPA10301-DPB14001 DPA10301-DPB14901 DPA10301-DPB15501 DPA10301-DPB16501 DPA10301-DPB17501 DPA10301-DPB18001 DPA10401-DPB10101 DPA10401-DPB10201; note = HLAs: DPA10401-DPB10202 DPA10401-DPB10402 DPA10401-DPB10501 DPA10401-DPB110501 DPA10401-DPB14901
PPFLWLGFELVPDK

SEQ ID NO: 6280 - protein, 20 aa, synthetic construct
  source 1..20: note = Seed: KEPPFLWMGYELHPDKWTVQ; note = HLAs: DPA10103-DPB10101 DPA10103-DPB10201 DPA10103-DPB10202 DPA10103-DPB10401 DPA10103-DPB10402 DPA10103-DPB10501 DPA10103-DPB110501 DPA10103-DPB112601 DPA10103-DPB11501 DPA10103-DPB11601 DPA10103-DPB11801 DPA10103-DPB11901 DPA10103-DPB12301 DPA10103-DPB13101 DPA10103-DPB13401 DPA10103-DPB13901 DPA10103-DPB14001 DPA10103-DPB14101 DPA10103-DPB14801 DPA10103-DPB14901 DPA10103-DPB15001 DPA10103-DPB15101 DPA10103-DPB15501 DPA10103-DPB15901 DPA10103-DPB18001 DPA10104-DPB10101 DPA10104-DPB11501 DPA10105-DPB10101 DPA10105-DPB10401 DPA10105-DPB11801 DPA10105-DPB15001 DPA10106-DPB10101 DPA10201-DPB10101 DPA10201-DPB10201 DPA10201-DPB10202 DPA10201-DPB10401 DPA10201-DPB10501 DPA10201-DPB110601 DPA10201-DPB11501 DPA10201-DPB11601 DPA10201-DPB11901 DPA10201-DPB13401 DPA10201-DPB15501 DPA10202-DPB10101 DPA10202-DPB10201 DPA10202-DPB10202 DPA10202-DPB10401 DPA10202-DPB10501 DPA10202-DPB110601 DPA10202-DPB11101 DPA10202-DPB11301 DPA10202-DPB11801 DPA10202-DPB11901 DPA10202-DPB13101 DPA10202-DPB13801; note = HLAs: DPA10202-DPB15501 DPA10202-DPB16501 DPA10301-DPB10101 DPA10301-DPB10201 DPA10301-DPB10202 DPA10301-DPB10401 DPA10301-DPB10402 DPA10301-DPB110501 DPA10301-DPB110601 DPA10301-DPB11101 DPA10301-DPB11301 DPA10301-DPB11801 DPA10301-DPB12301 DPA10301-DPB13901 DPA10301-DPB14001 DPA10301-DPB14901 DPA10301-DPB15501 DPA10301-DPB16501 DPA10301-DPB17501 DPA10301-DPB18001 DPA10401-DPB10101 DPA10401-DPB10201 DPA10401-DPB10202 DPA10401-DPB10402 DPA10401-DPB10501 DPA10401-DPB110501 DPA10401-DPB14901
KEPPFLWEGFELMPDKWTVQ

SEQ ID NO: 6281 - protein, 14 aa, synthetic construct
  source 1..14: note = Seed: PPFLWMGYELHPDK; note = HLAs: DPA10103-DPB10101 DPA10103-DPB10201 DPA10103-DPB10202 DPA10103-DPB10401 DPA10103-DPB112601 DPA10103-DPB11501 DPA10103-DPB11601 DPA10103-DPB11901 DPA10103-DPB12301 DPA10103-DPB13101 DPA10103-DPB13401 DPA10103-DPB13901 DPA10103-DPB14001 DPA10103-DPB14101 DPA10103-DPB14801 DPA10103-DPB15001 DPA10103-DPB15901 DPA10104-DPB10101 DPA10104-DPB11501 DPA10105-DPB10101 DPA10105-DPB10401 DPA10105-DPB15001 DPA10106-DPB10101 DPA10201-DPB10101 DPA10201-DPB110601 DPA10201-DPB11501 DPA10201-DPB11601 DPA10201-DPB11901 DPA10202-DPB10101 DPA10202-DPB10201 DPA10202-DPB10202 DPA10202-DPB10401 DPA10202-DPB110601 DPA10202-DPB11901 DPA10202-DPB13101 DPA10202-DPB16501 DPA10301-DPB10101 DPA10301-DPB10201 DPA10301-DPB10202 DPA10301-DPB10401 DPA10301-DPB10402 DPA10301-DPB110501 DPA10301-DPB110601 DPA10301-DPB11801 DPA10301-DPB12301 DPA10301-DPB13901 DPA10301-DPB14001 DPA10301-DPB14901 DPA10301-DPB15501 DPA10301-DPB16501 DPA10301-DPB17501 DPA10301-DPB18001 DPA10401-DPB10101 DPA10401-DPB10201; note = HLAs: DPA10401-DPB10202 DPA10401-DPB10402 DPA10401-DPB10501 DPA10401-DPB110501 DPA10401-DPB14901
PPFLWTGWELIPDK

SEQ ID NO: 6282 - protein, 14 aa, synthetic construct
  source 1..14: note = Seed: PPFLWMGYELHPDK; note = HLAs: DRB1_1001 DPA10103-DPB10101 DPA10103-DPB10201 DPA10103-DPB10202 DPA10103-DPB10401 DPA10103-DPB112601 DPA10103-DPB11501 DPA10103-DPB11601 DPA10103-DPB11901 DPA10103-DPB12301 DPA10103-DPB13101 DPA10103-DPB13401 DPA10103-DPB13901 DPA10103-DPB14001 DPA10103-DPB14101 DPA10103-DPB14801 DPA10103-DPB15001 DPA10103-DPB15901 DPA10104-DPB10101 DPA10104-DPB11501 DPA10105-DPB10101 DPA10105-DPB10401 DPA10105-DPB15001 DPA10106-DPB10101 DPA10201-DPB10101 DPA10201-DPB110601 DPA10201-DPB11501 DPA10201-DPB11601 DPA10201-DPB11901 DPA10202-DPB10101 DPA10202-DPB10201 DPA10202-DPB10202 DPA10202-DPB10401 DPA10202-DPB110601 DPA10202-DPB11901 DPA10202-DPB13101 DPA10202-DPB16501 DPA10301-DPB10101 DPA10301-DPB10201 DPA10301-DPB10202 DPA10301-DPB10401 DPA10301-DPB10402 DPA10301-DPB110501 DPA10301-DPB110601 DPA10301-DPB11801 DPA10301-DPB12301 DPA10301-DPB13901 DPA10301-DPB14001 DPA10301-DPB14901 DPA10301-DPB15501 DPA10301-DPB16501 DPA10301-DPB17501 DPA10301-DPB18001 DPA10401-DPB10101 DPA10401-DPB10201; note = HLAs: DPA10401-DPB10202 DPA10401-DPB10402 DPA10401-DPB10501 DPA10401-DPB110501 DPA10401-DPB14901
PPFLWAGFELAPDK

SEQ ID NO: 6283 - protein, 14 aa, synthetic construct
  source 1..14: note = Seed: PPFLWMGYELHPDK; note = HLAs: DPA10103-DPB10101 DPA10103-DPB10201 DPA10103-DPB10202 DPA10103-DPB10401 DPA10103-DPB112601 DPA10103-DPB11501 DPA10103-DPB11601 DPA10103-DPB11901 DPA10103-DPB12301 DPA10103-DPB13101 DPA10103-DPB13401 DPA10103-DPB13901 DPA10103-DPB14001 DPA10103-DPB14101 DPA10103-DPB14801 DPA10103-DPB15001 DPA10103-DPB15901 DPA10104-DPB10101 DPA10104-DPB11501 DPA10105-DPB10101 DPA10105-DPB10401 DPA10105-DPB15001 DPA10106-DPB10101 DPA10201-DPB10101 DPA10201-DPB110601 DPA10201-DPB11501 DPA10201-DPB11601 DPA10201-DPB11901 DPA10202-DPB10101 DPA10202-DPB10201 DPA10202-DPB10202 DPA10202-DPB10401 DPA10202-DPB110601 DPA10202-DPB11901 DPA10202-DPB13101 DPA10202-DPB16501 DPA10301-DPB10101 DPA10301-DPB10201 DPA10301-DPB10202 DPA10301-DPB10401 DPA10301-DPB10402 DPA10301-DPB110501 DPA10301-DPB110601 DPA10301-DPB11801 DPA10301-DPB12301 DPA10301-DPB13901 DPA10301-DPB14001 DPA10301-DPB14901 DPA10301-DPB15501 DPA10301-DPB16501 DPA10301-DPB17501 DPA10301-DPB18001 DPA10401-DPB10101 DPA10401-DPB10201; note = HLAs: DPA10401-DPB10202 DPA10401-DPB10402 DPA10401-DPB10501 DPA10401-DPB110501 DPA10401-DPB14901
PPFLWSGWELLPDK

SEQ ID NO: 6284 - protein, 14 aa, synthetic construct
  source 1..14: note = Seed: PPFLWMGYELHPDK; note = HLAs: DPA10103-DPB10101 DPA10103-DPB10201 DPA10103-DPB10202 DPA10103-DPB10401 DPA10103-DPB112601 DPA10103-DPB11501 DPA10103-DPB11601 DPA10103-DPB11901 DPA10103-DPB12301 DPA10103-DPB13101 DPA10103-DPB13401 DPA10103-DPB13901 DPA10103-DPB14001 DPA10103-DPB14101 DPA10103-DPB14801 DPA10103-DPB15001 DPA10103-DPB15901 DPA10104-DPB10101 DPA10104-DPB11501 DPA10105-DPB10101 DPA10105-DPB10401 DPA10105-DPB15001 DPA10106-DPB10101 DPA10201-DPB10101 DPA10201-DPB110601 DPA10201-DPB11501 DPA10201-DPB11601 DPA10201-DPB11901 DPA10202-DPB10101 DPA10202-DPB10201 DPA10202-DPB10202 DPA10202-DPB10401 DPA10202-DPB110601 DPA10202-DPB11901 DPA10202-DPB13101 DPA10202-DPB16501 DPA10301-DPB10101 DPA10301-DPB10201 DPA10301-DPB10202 DPA10301-DPB10401 DPA10301-DPB10402 DPA10301-DPB110501 DPA10301-DPB110601 DPA10301-DPB11801 DPA10301-DPB12301 DPA10301-DPB13901 DPA10301-DPB14001 DPA10301-DPB14901 DPA10301-DPB15501 DPA10301-DPB16501 DPA10301-DPB17501 DPA10301-DPB18001 DPA10401-DPB10101 DPA10401-DPB10201; note = HLAs: DPA10401-DPB10202 DPA10401-DPB10402 DPA10401-DPB10501 DPA10401-DPB110501 DPA10401-DPB14901
PPFLWAGFELYPDK

SEQ ID NO: 6285 - protein, 20 aa, synthetic construct
  source 1..20: note = Seed: KEPPFLWMGYELHPDKWTVQ; note = HLAs: DRB1_0101 DRB1_1001 DPA10103-DPB10101 DPA10103-DPB10201 DPA10103-DPB10202 DPA10103-DPB10401 DPA10103-DPB10402 DPA10103-DPB10501 DPA10103-DPB110501 DPA10103-DPB112601 DPA10103-DPB11501 DPA10103-DPB11601 DPA10103-DPB11801 DPA10103-DPB11901 DPA10103-DPB12301 DPA10103-DPB13101 DPA10103-DPB13401 DPA10103-DPB13901 DPA10103-DPB14001 DPA10103-DPB14101 DPA10103-DPB14801 DPA10103-DPB14901 DPA10103-DPB15001 DPA10103-DPB15101 DPA10103-DPB15501 DPA10103-DPB15901 DPA10103-DPB18001 DPA10104-DPB10101 DPA10104-DPB11501 DPA10105-DPB10101 DPA10105-DPB10401 DPA10105-DPB11801 DPA10105-DPB15001 DPA10106-DPB10101 DPA10201-DPB10101 DPA10201-DPB10201 DPA10201-DPB10202 DPA10201-DPB10401 DPA10201-DPB10501 DPA10201-DPB110601 DPA10201-DPB11501 DPA10201-DPB11601 DPA10201-DPB11901 DPA10201-DPB13401 DPA10201-DPB15501 DPA10202-DPB10101 DPA10202-DPB10201 DPA10202-DPB10202 DPA10202-DPB10401 DPA10202-DPB10501 DPA10202-DPB110601 DPA10202-DPB11101 DPA10202-DPB11301 DPA10202-DPB11801 DPA10202-DPB11901; note = HLAs: DPA10202-DPB13101 DPA10202-DPB13801 DPA10202-DPB15501 DPA10202-DPB16501 DPA10301-DPB10101 DPA10301-DPB10201 DPA10301-DPB10202 DPA10301-DPB10401 DPA10301-DPB10402 DPA10301-DPB110501 DPA10301-DPB110601 DPA10301-DPB11101 DPA10301-DPB11301 DPA10301-DPB11801 DPA10301-DPB12301 DPA10301-DPB13901 DPA10301-DPB14001 DPA10301-DPB14901 DPA10301-DPB15501 DPA10301-DPB16501 DPA10301-DPB17501 DPA10301-DPB18001 DPA10401-DPB10101 DPA10401-DPB10201 DPA10401-DPB10202 DPA10401-DPB10402 DPA10401-DPB10501 DPA10401-DPB110501 DPA10401-DPB14901
KEPPFLWVGFELVPDKWTVQ

SEQ ID NO: 6286 - protein, 20 aa, synthetic construct
  source 1..20: note = Seed: KEPPFLWMGYELHPDKWTVQ; note = HLAs: DPA10103-DPB10101 DPA10103-DPB10201 DPA10103-DPB10202 DPA10103-DPB10401 DPA10103-DPB10402 DPA10103-DPB10501 DPA10103-DPB110501 DPA10103-DPB112601 DPA10103-DPB11501 DPA10103-DPB11601 DPA10103-DPB11801 DPA10103-DPB11901 DPA10103-DPB12301 DPA10103-DPB13101 DPA10103-DPB13401 DPA10103-DPB13901 DPA10103-DPB14001 DPA10103-DPB14101 DPA10103-DPB14801 DPA10103-DPB14901 DPA10103-DPB15001 DPA10103-DPB15101 DPA10103-DPB15501 DPA10103-DPB15901 DPA10103-DPB18001 DPA10104-DPB10101 DPA10104-DPB11501 DPA10105-DPB10101 DPA10105-DPB10401 DPA10105-DPB11801 DPA10105-DPB15001 DPA10106-DPB10101 DPA10201-DPB10101 DPA10201-DPB10201 DPA10201-DPB10202 DPA10201-DPB10401 DPA10201-DPB10501 DPA10201-DPB110601 DPA10201-DPB11501 DPA10201-DPB11601 DPA10201-DPB11901 DPA10201-DPB13401 DPA10201-DPB15501 DPA10202-DPB10101 DPA10202-DPB10201 DPA10202-DPB10202 DPA10202-DPB10401 DPA10202-DPB10501 DPA10202-DPB110601 DPA10202-DPB11101 DPA10202-DPB11301 DPA10202-DPB11801 DPA10202-DPB11901 DPA10202-DPB13101 DPA10202-DPB13801; note = HLAs: DPA10202-DPB15501 DPA10202-DPB16501 DPA10301-DPB10101 DPA10301-DPB10201 DPA10301-DPB10202 DPA10301-DPB10401 DPA10301-DPB10402 DPA10301-DPB110501 DPA10301-DPB110601 DPA10301-DPB11101 DPA10301-DPB11301 DPA10301-DPB11801 DPA10301-DPB12301 DPA10301-DPB13901 DPA10301-DPB14001 DPA10301-DPB14901 DPA10301-DPB15501 DPA10301-DPB16501 DPA10301-DPB17501 DPA10301-DPB18001 DPA10401-DPB10101 DPA10401-DPB10201 DPA10401-DPB10202 DPA10401-DPB10402 DPA10401-DPB10501 DPA10401-DPB110501 DPA10401-DPB14901
KEPPLLWTGFELLPDKWTVQ

SEQ ID NO: 6287 - protein, 14 aa, synthetic construct
  source 1..14: note = Seed: PPFLWMGYELHPDK; note = HLAs: DRB1_1001 DPA10103-DPB10101 DPA10103-DPB10201 DPA10103-DPB10202 DPA10103-DPB10401 DPA10103-DPB112601 DPA10103-DPB11501 DPA10103-DPB11601 DPA10103-DPB11901 DPA10103-DPB12301 DPA10103-DPB13101 DPA10103-DPB13401 DPA10103-DPB13901 DPA10103-DPB14001 DPA10103-DPB14101 DPA10103-DPB14801 DPA10103-DPB15001 DPA10103-DPB15901 DPA10104-DPB10101 DPA10104-DPB11501 DPA10105-DPB10101 DPA10105-DPB10401 DPA10105-DPB15001 DPA10106-DPB10101 DPA10201-DPB10101 DPA10201-DPB110601 DPA10201-DPB11501 DPA10201-DPB11601 DPA10201-DPB11901 DPA10202-DPB10101 DPA10202-DPB10201 DPA10202-DPB10202 DPA10202-DPB10401 DPA10202-DPB110601 DPA10202-DPB11901 DPA10202-DPB13101 DPA10202-DPB16501 DPA10301-DPB10101 DPA10301-DPB10201 DPA10301-DPB10202 DPA10301-DPB10401 DPA10301-DPB10402 DPA10301-DPB110501 DPA10301-DPB110601 DPA10301-DPB11801 DPA10301-DPB12301 DPA10301-DPB13901 DPA10301-DPB14001 DPA10301-DPB14901 DPA10301-DPB15501 DPA10301-DPB16501 DPA10301-DPB17501 DPA10301-DPB18001 DPA10401-DPB10101 DPA10401-DPB10201; note = HLAs: DPA10401-DPB10202 DPA10401-DPB10402 DPA10401-DPB10501 DPA10401-DPB110501 DPA10401-DPB14901
PPYLWAGFELIPDK

SEQ ID NO: 6288 - protein, 14 aa, synthetic construct
  source 1..14: note = Seed: PPFLWMGYELHPDK; note = HLAs: DPA10103-DPB10101 DPA10103-DPB10201 DPA10103-DPB10202 DPA10103-DPB10401 DPA10103-DPB112601 DPA10103-DPB11501 DPA10103-DPB11601 DPA10103-DPB11901 DPA10103-DPB12301 DPA10103-DPB13101 DPA10103-DPB13401 DPA10103-DPB13901 DPA10103-DPB14001 DPA10103-DPB14101 DPA10103-DPB14801 DPA10103-DPB15001 DPA10103-DPB15901 DPA10104-DPB10101 DPA10104-DPB11501 DPA10105-DPB10101 DPA10105-DPB10401 DPA10105-DPB15001 DPA10106-DPB10101 DPA10201-DPB10101 DPA10201-DPB110601 DPA10201-DPB11501 DPA10201-DPB11601 DPA10201-DPB11901 DPA10202-DPB10101 DPA10202-DPB10201 DPA10202-DPB10202 DPA10202-DPB10401 DPA10202-DPB110601 DPA10202-DPB11901 DPA10202-DPB13101 DPA10202-DPB16501 DPA10301-DPB10101 DPA10301-DPB10201 DPA10301-DPB10202 DPA10301-DPB10401 DPA10301-DPB10402 DPA10301-DPB110501 DPA10301-DPB110601 DPA10301-DPB11801 DPA10301-DPB12301 DPA10301-DPB13901 DPA10301-DPB14001 DPA10301-DPB14901 DPA10301-DPB15501 DPA10301-DPB16501 DPA10301-DPB17501 DPA10301-DPB18001 DPA10401-DPB10101 DPA10401-DPB10201; note = HLAs: DPA10401-DPB10202 DPA10401-DPB10402 DPA10401-DPB10501 DPA10401-DPB110501 DPA10401-DPB14901
PPYLWHGFELLPDK

SEQ ID NO: 6289 - protein, 20 aa, synthetic construct
  source 1..20: note = Seed: KEPPFLWMGYELHPDKWTVQ; note = HLAs: DPA10103-DPB10101 DPA10103-DPB10201 DPA10103-DPB10202 DPA10103-DPB10401 DPA10103-DPB10402 DPA10103-DPB10501 DPA10103-DPB110501 DPA10103-DPB112601 DPA10103-DPB11501 DPA10103-DPB11601 DPA10103-DPB11801 DPA10103-DPB11901 DPA10103-DPB12301 DPA10103-DPB13101 DPA10103-DPB13401 DPA10103-DPB13901 DPA10103-DPB14001 DPA10103-DPB14101 DPA10103-DPB14801 DPA10103-DPB14901 DPA10103-DPB15001 DPA10103-DPB15101 DPA10103-DPB15501 DPA10103-DPB15901 DPA10103-DPB18001 DPA10104-DPB10101 DPA10104-DPB11501 DPA10105-DPB10101 DPA10105-DPB10401 DPA10105-DPB11801 DPA10105-DPB15001 DPA10106-DPB10101 DPA10201-DPB10101 DPA10201-DPB10201 DPA10201-DPB10202 DPA10201-DPB10401 DPA10201-DPB10501 DPA10201-DPB110601 DPA10201-DPB11501 DPA10201-DPB11601 DPA10201-DPB11901 DPA10201-DPB13401 DPA10201-DPB15501 DPA10202-DPB10101 DPA10202-DPB10201 DPA10202-DPB10202 DPA10202-DPB10401 DPA10202-DPB10501 DPA10202-DPB110601 DPA10202-DPB11101 DPA10202-DPB11301 DPA10202-DPB11801 DPA10202-DPB11901 DPA10202-DPB13101 DPA10202-DPB13801; note = HLAs: DPA10202-DPB15501 DPA10202-DPB16501 DPA10301-DPB10101 DPA10301-DPB10201 DPA10301-DPB10202 DPA10301-DPB10401 DPA10301-DPB10402 DPA10301-DPB110501 DPA10301-DPB110601 DPA10301-DPB11101 DPA10301-DPB11301 DPA10301-DPB11801 DPA10301-DPB12301 DPA10301-DPB13901 DPA10301-DPB14001 DPA10301-DPB14901 DPA10301-DPB15501 DPA10301-DPB16501 DPA10301-DPB17501 DPA10301-DPB18001 DPA10401-DPB10101 DPA10401-DPB10201 DPA10401-DPB10202 DPA10401-DPB10402 DPA10401-DPB10501 DPA10401-DPB110501 DPA10401-DPB14901
KEPPFLWKGFELLPDKWTVQ

SEQ ID NO: 6290 - protein, 14 aa, synthetic construct
  source 1..14: note = Seed: PPFLWMGYELHPDK; note = HLAs: DRB1_1001 DPA10103-DPB10101 DPA10103-DPB10201 DPA10103-DPB10202 DPA10103-DPB10401 DPA10103-DPB112601 DPA10103-DPB11501 DPA10103-DPB11601 DPA10103-DPB11901 DPA10103-DPB12301 DPA10103-DPB13101 DPA10103-DPB13401 DPA10103-DPB13901 DPA10103-DPB14001 DPA10103-DPB14101 DPA10103-DPB14801 DPA10103-DPB15001 DPA10103-DPB15901 DPA10104-DPB10101 DPA10104-DPB11501 DPA10105-DPB10101 DPA10105-DPB10401 DPA10105-DPB15001 DPA10106-DPB10101 DPA10201-DPB10101 DPA10201-DPB110601 DPA10201-DPB11501 DPA10201-DPB11601 DPA10201-DPB11901 DPA10202-DPB10101 DPA10202-DPB10201 DPA10202-DPB10202 DPA10202-DPB10401 DPA10202-DPB110601 DPA10202-DPB11901 DPA10202-DPB13101 DPA10202-DPB16501 DPA10301-DPB10101 DPA10301-DPB10201 DPA10301-DPB10202 DPA10301-DPB10401 DPA10301-DPB10402 DPA10301-DPB110501 DPA10301-DPB110601 DPA10301-DPB11801 DPA10301-DPB12301 DPA10301-DPB13901 DPA10301-DPB14001 DPA10301-DPB14901 DPA10301-DPB15501 DPA10301-DPB16501 DPA10301-DPB17501 DPA10301-DPB18001 DPA10401-DPB10101 DPA10401-DPB10201; note = HLAs: DPA10401-DPB10202 DPA10401-DPB10402 DPA10401-DPB10501 DPA10401-DPB110501 DPA10401-DPB14901
PPFLWMGFELIPDK

SEQ ID NO: 6291 - protein, 20 aa, synthetic construct
  source 1..20: note = Seed: KEPPFLWMGYELHPDKWTVQ; note = HLAs: DRB1_0101 DRB1_1001 DPA10103-DPB10101 DPA10103-DPB10201 DPA10103-DPB10202 DPA10103-DPB10401 DPA10103-DPB10402 DPA10103-DPB10501 DPA10103-DPB110501 DPA10103-DPB112601 DPA10103-DPB11501 DPA10103-DPB11601 DPA10103-DPB11801 DPA10103-DPB11901 DPA10103-DPB12301 DPA10103-DPB13101 DPA10103-DPB13401 DPA10103-DPB13901 DPA10103-DPB14001 DPA10103-DPB14101 DPA10103-DPB14801 DPA10103-DPB14901 DPA10103-DPB15001 DPA10103-DPB15101 DPA10103-DPB15501 DPA10103-DPB15901 DPA10103-DPB18001 DPA10104-DPB10101 DPA10104-DPB11501 DPA10105-DPB10101 DPA10105-DPB10401 DPA10105-DPB11801 DPA10105-DPB15001 DPA10106-DPB10101 DPA10201-DPB10101 DPA10201-DPB10201 DPA10201-DPB10202 DPA10201-DPB10401 DPA10201-DPB10501 DPA10201-DPB110601 DPA10201-DPB11501 DPA10201-DPB11601 DPA10201-DPB11901 DPA10201-DPB13401 DPA10201-DPB15501 DPA10202-DPB10101 DPA10202-DPB10201 DPA10202-DPB10202 DPA10202-DPB10401 DPA10202-DPB10501 DPA10202-DPB110601 DPA10202-DPB11101 DPA10202-DPB11301 DPA10202-DPB11801 DPA10202-DPB11901; note = HLAs: DPA10202-DPB13101 DPA10202-DPB13801 DPA10202-DPB15501 DPA10202-DPB16501 DPA10301-DPB10101 DPA10301-DPB10201 DPA10301-DPB10202 DPA10301-DPB10401 DPA10301-DPB10402 DPA10301-DPB110501 DPA10301-DPB110601 DPA10301-DPB11101 DPA10301-DPB11301 DPA10301-DPB11801 DPA10301-DPB12301 DPA10301-DPB13901 DPA10301-DPB14001 DPA10301-DPB14901 DPA10301-DPB15501 DPA10301-DPB16501 DPA10301-DPB17501 DPA10301-DPB18001 DPA10401-DPB10101 DPA10401-DPB10201 DPA10401-DPB10202 DPA10401-DPB10402 DPA10401-DPB10501 DPA10401-DPB110501 DPA10401-DPB14901
KEPPFLWAGFELAPDKWTVQ

SEQ ID NO: 6292 - protein, 20 aa, synthetic construct
  source 1..20: note = Seed: KEPPFLWMGYELHPDKWTVQ; note = HLAs: DRB1_0101 DRB1_1001 DPA10103-DPB10101 DPA10103-DPB10201 DPA10103-DPB10202 DPA10103-DPB10401 DPA10103-DPB10402 DPA10103-DPB10501 DPA10103-DPB110501 DPA10103-DPB112601 DPA10103-DPB11501 DPA10103-DPB11601 DPA10103-DPB11801 DPA10103-DPB11901 DPA10103-DPB12301 DPA10103-DPB13101 DPA10103-DPB13401 DPA10103-DPB13901 DPA10103-DPB14001 DPA10103-DPB14101 DPA10103-DPB14801 DPA10103-DPB14901 DPA10103-DPB15001 DPA10103-DPB15101 DPA10103-DPB15501 DPA10103-DPB15901 DPA10103-DPB18001 DPA10104-DPB10101 DPA10104-DPB11501 DPA10105-DPB10101 DPA10105-DPB10401 DPA10105-DPB11801 DPA10105-DPB15001 DPA10106-DPB10101 DPA10201-DPB10101 DPA10201-DPB10201 DPA10201-DPB10202 DPA10201-DPB10401 DPA10201-DPB10501 DPA10201-DPB110601 DPA10201-DPB11501 DPA10201-DPB11601 DPA10201-DPB11901 DPA10201-DPB13401 DPA10201-DPB15501 DPA10202-DPB10101 DPA10202-DPB10201 DPA10202-DPB10202 DPA10202-DPB10401 DPA10202-DPB10501 DPA10202-DPB110601 DPA10202-DPB11101 DPA10202-DPB11301 DPA10202-DPB11801 DPA10202-DPB11901; note = HLAs: DPA10202-DPB13101 DPA10202-DPB13801 DPA10202-DPB15501 DPA10202-DPB16501 DPA10301-DPB10101 DPA10301-DPB10201 DPA10301-DPB10202 DPA10301-DPB10401 DPA10301-DPB10402 DPA10301-DPB110501 DPA10301-DPB110601 DPA10301-DPB11101 DPA10301-DPB11301 DPA10301-DPB11801 DPA10301-DPB12301 DPA10301-DPB13901 DPA10301-DPB14001 DPA10301-DPB14901 DPA10301-DPB15501 DPA10301-DPB16501 DPA10301-DPB17501 DPA10301-DPB18001 DPA10401-DPB10101 DPA10401-DPB10201 DPA10401-DPB10202 DPA10401-DPB10402 DPA10401-DPB10501 DPA10401-DPB110501 DPA10401-DPB14901
KEPPFLWIGFELVPDKWTVQ

SEQ ID NO: 6293 - protein, 14 aa, synthetic construct
  source 1..14: note = Seed: PPFLWMGYELHPDK; note = HLAs: DRB1_1001 DPA10103-DPB10101 DPA10103-DPB10201 DPA10103-DPB10202 DPA10103-DPB10401 DPA10103-DPB112601 DPA10103-DPB11501 DPA10103-DPB11601 DPA10103-DPB11901 DPA10103-DPB12301 DPA10103-DPB13101 DPA10103-DPB13401 DPA10103-DPB13901 DPA10103-DPB14001 DPA10103-DPB14101 DPA10103-DPB14801 DPA10103-DPB15001 DPA10103-DPB15901 DPA10104-DPB10101 DPA10104-DPB11501 DPA10105-DPB10101 DPA10105-DPB10401 DPA10105-DPB15001 DPA10106-DPB10101 DPA10201-DPB10101 DPA10201-DPB110601 DPA10201-DPB11501 DPA10201-DPB11601 DPA10201-DPB11901 DPA10202-DPB10101 DPA10202-DPB10201 DPA10202-DPB10202 DPA10202-DPB10401 DPA10202-DPB110601 DPA10202-DPB11901 DPA10202-DPB13101 DPA10202-DPB16501 DPA10301-DPB10101 DPA10301-DPB10201 DPA10301-DPB10202 DPA10301-DPB10401 DPA10301-DPB10402 DPA10301-DPB110501 DPA10301-DPB110601 DPA10301-DPB11801 DPA10301-DPB12301 DPA10301-DPB13901 DPA10301-DPB14001 DPA10301-DPB14901 DPA10301-DPB15501 DPA10301-DPB16501 DPA10301-DPB17501 DPA10301-DPB18001 DPA10401-DPB10101 DPA10401-DPB10201; note = HLAs: DPA10401-DPB10202 DPA10401-DPB10402 DPA10401-DPB10501 DPA10401-DPB110501 DPA10401-DPB14901
PPFLWAGFELTPDK

SEQ ID NO: 6294 - protein, 20 aa, synthetic construct
  source 1..20: note = Seed: KEPPFLWMGYELHPDKWTVQ; note = HLAs: DRB1_0101 DPA10103-DPB10101 DPA10103-DPB10201 DPA10103-DPB10202 DPA10103-DPB10401 DPA10103-DPB10402 DPA10103-DPB10501 DPA10103-DPB110501 DPA10103-DPB112601 DPA10103-DPB11501 DPA10103-DPB11601 DPA10103-DPB11801 DPA10103-DPB11901 DPA10103-DPB12301 DPA10103-DPB13101 DPA10103-DPB13401 DPA10103-DPB13901 DPA10103-DPB14001 DPA10103-DPB14101 DPA10103-DPB14801 DPA10103-DPB14901 DPA10103-DPB15001 DPA10103-DPB15101 DPA10103-DPB15501 DPA10103-DPB15901 DPA10103-DPB18001 DPA10104-DPB10101 DPA10104-DPB11501 DPA10105-DPB10101 DPA10105-DPB10401 DPA10105-DPB11801 DPA10105-DPB15001 DPA10106-DPB10101 DPA10201-DPB10101 DPA10201-DPB10201 DPA10201-DPB10202 DPA10201-DPB10401 DPA10201-DPB10501 DPA10201-DPB110601 DPA10201-DPB11501 DPA10201-DPB11601 DPA10201-DPB11901 DPA10201-DPB13401 DPA10201-DPB15501 DPA10202-DPB10101 DPA10202-DPB10201 DPA10202-DPB10202 DPA10202-DPB10401 DPA10202-DPB10501 DPA10202-DPB110601 DPA10202-DPB11101 DPA10202-DPB11301 DPA10202-DPB11801 DPA10202-DPB11901 DPA10202-DPB13101; note = HLAs: DPA10202-DPB13801 DPA10202-DPB15501 DPA10202-DPB16501 DPA10301-DPB10101 DPA10301-DPB10201 DPA10301-DPB10202 DPA10301-DPB10401 DPA10301-DPB10402 DPA10301-DPB110501 DPA10301-DPB110601 DPA10301-DPB11101 DPA10301-DPB11301 DPA10301-DPB11801 DPA10301-DPB12301 DPA10301-DPB13901 DPA10301-DPB14001 DPA10301-DPB14901 DPA10301-DPB15501 DPA10301-DPB16501 DPA10301-DPB17501 DPA10301-DPB18001 DPA10401-DPB10101 DPA10401-DPB10201 DPA10401-DPB10202 DPA10401-DPB10402 DPA10401-DPB10501 DPA10401-DPB110501 DPA10401-DPB14901
KEPPYLWAGFELLPDKWTVQ

SEQ ID NO: 6295 - protein, 14 aa, synthetic construct
  source 1..14: note = Seed: PPFLWMGYELHPDK; note = HLAs: DRB1_1001 DPA10103-DPB10101 DPA10103-DPB10201 DPA10103-DPB10202 DPA10103-DPB10401 DPA10103-DPB112601 DPA10103-DPB11501 DPA10103-DPB11601 DPA10103-DPB11901 DPA10103-DPB12301 DPA10103-DPB13101 DPA10103-DPB13401 DPA10103-DPB13901 DPA10103-DPB14001 DPA10103-DPB14101 DPA10103-DPB14801 DPA10103-DPB15001 DPA10103-DPB15901 DPA10104-DPB10101 DPA10104-DPB11501 DPA10105-DPB10101 DPA10105-DPB10401 DPA10105-DPB15001 DPA10106-DPB10101 DPA10201-DPB10101 DPA10201-DPB110601 DPA10201-DPB11501 DPA10201-DPB11601 DPA10201-DPB11901 DPA10202-DPB10101 DPA10202-DPB10201 DPA10202-DPB10202 DPA10202-DPB10401 DPA10202-DPB110601 DPA10202-DPB11901 DPA10202-DPB13101 DPA10202-DPB16501 DPA10301-DPB10101 DPA10301-DPB10201 DPA10301-DPB10202 DPA10301-DPB10401 DPA10301-DPB10402 DPA10301-DPB110501 DPA10301-DPB110601 DPA10301-DPB11801 DPA10301-DPB12301 DPA10301-DPB13901 DPA10301-DPB14001 DPA10301-DPB14901 DPA10301-DPB15501 DPA10301-DPB16501 DPA10301-DPB17501 DPA10301-DPB18001 DPA10401-DPB10101 DPA10401-DPB10201; note = HLAs: DPA10401-DPB10202 DPA10401-DPB10402 DPA10401-DPB10501 DPA10401-DPB110501 DPA10401-DPB14901
PPYLWAGFELVPDK

SEQ ID NO: 6296 - protein, 14 aa, synthetic construct
  source 1..14: note = Seed: PPFLWMGYELHPDK; note = HLAs: DPA10103-DPB10101 DPA10103-DPB10201 DPA10103-DPB10202 DPA10103-DPB10401 DPA10103-DPB112601 DPA10103-DPB11501 DPA10103-DPB11601 DPA10103-DPB11901 DPA10103-DPB12301 DPA10103-DPB13101 DPA10103-DPB13401 DPA10103-DPB13901 DPA10103-DPB14001 DPA10103-DPB14101 DPA10103-DPB14801 DPA10103-DPB15001 DPA10103-DPB15901 DPA10104-DPB10101 DPA10104-DPB11501 DPA10105-DPB10101 DPA10105-DPB10401 DPA10105-DPB15001 DPA10106-DPB10101 DPA10201-DPB10101 DPA10201-DPB110601 DPA10201-DPB11501 DPA10201-DPB11601 DPA10201-DPB11901 DPA10202-DPB10101 DPA10202-DPB10201 DPA10202-DPB10202 DPA10202-DPB10401 DPA10202-DPB110601 DPA10202-DPB11901 DPA10202-DPB13101 DPA10202-DPB16501 DPA10301-DPB10101 DPA10301-DPB10201 DPA10301-DPB10202 DPA10301-DPB10401 DPA10301-DPB10402 DPA10301-DPB110501 DPA10301-DPB110601 DPA10301-DPB11801 DPA10301-DPB12301 DPA10301-DPB13901 DPA10301-DPB14001 DPA10301-DPB14901 DPA10301-DPB15501 DPA10301-DPB16501 DPA10301-DPB17501 DPA10301-DPB18001 DPA10401-DPB10101 DPA10401-DPB10201; note = HLAs: DPA10401-DPB10202 DPA10401-DPB10402 DPA10401-DPB10501 DPA10401-DPB110501 DPA10401-DPB14901
PPLLWAGFELVPDK

SEQ ID NO: 6297 - protein, 14 aa, synthetic construct
  source 1..14: note = Seed: PPFLWMGYELHPDK; note = HLAs: DRB1_1001 DPA10103-DPB10101 DPA10103-DPB10201 DPA10103-DPB10202 DPA10103-DPB10401 DPA10103-DPB112601 DPA10103-DPB11501 DPA10103-DPB11601 DPA10103-DPB11901 DPA10103-DPB12301 DPA10103-DPB13101 DPA10103-DPB13401 DPA10103-DPB13901 DPA10103-DPB14001 DPA10103-DPB14101 DPA10103-DPB14801 DPA10103-DPB15001 DPA10103-DPB15901 DPA10104-DPB10101 DPA10104-DPB11501 DPA10105-DPB10101 DPA10105-DPB10401 DPA10105-DPB15001 DPA10106-DPB10101 DPA10201-DPB10101 DPA10201-DPB110601 DPA10201-DPB11501 DPA10201-DPB11601 DPA10201-DPB11901 DPA10202-DPB10101 DPA10202-DPB10201 DPA10202-DPB10202 DPA10202-DPB10401 DPA10202-DPB110601 DPA10202-DPB11901 DPA10202-DPB13101 DPA10202-DPB16501 DPA10301-DPB10101 DPA10301-DPB10201 DPA10301-DPB10202 DPA10301-DPB10401 DPA10301-DPB10402 DPA10301-DPB110501 DPA10301-DPB110601 DPA10301-DPB11801 DPA10301-DPB12301 DPA10301-DPB13901 DPA10301-DPB14001 DPA10301-DPB14901 DPA10301-DPB15501 DPA10301-DPB16501 DPA10301-DPB17501 DPA10301-DPB18001 DPA10401-DPB10101 DPA10401-DPB10201; note = HLAs: DPA10401-DPB10202 DPA10401-DPB10402 DPA10401-DPB10501 DPA10401-DPB110501 DPA10401-DPB14901
PPFLWEGFELAPDK

SEQ ID NO: 6298 - protein, 14 aa, synthetic construct
  source 1..14: note = Seed: PPFLWMGYELHPDK; note = HLAs: DRB1_1001 DPA10103-DPB10101 DPA10103-DPB10201 DPA10103-DPB10202 DPA10103-DPB10401 DPA10103-DPB112601 DPA10103-DPB11501 DPA10103-DPB11601 DPA10103-DPB11901 DPA10103-DPB12301 DPA10103-DPB13101 DPA10103-DPB13401 DPA10103-DPB13901 DPA10103-DPB14001 DPA10103-DPB14101 DPA10103-DPB14801 DPA10103-DPB15001 DPA10103-DPB15901 DPA10104-DPB10101 DPA10104-DPB11501 DPA10105-DPB10101 DPA10105-DPB10401 DPA10105-DPB15001 DPA10106-DPB10101 DPA10201-DPB10101 DPA10201-DPB110601 DPA10201-DPB11501 DPA10201-DPB11601 DPA10201-DPB11901 DPA10202-DPB10101 DPA10202-DPB10201 DPA10202-DPB10202 DPA10202-DPB10401 DPA10202-DPB110601 DPA10202-DPB11901 DPA10202-DPB13101 DPA10202-DPB16501 DPA10301-DPB10101 DPA10301-DPB10201 DPA10301-DPB10202 DPA10301-DPB10401 DPA10301-DPB10402 DPA10301-DPB110501 DPA10301-DPB110601 DPA10301-DPB11801 DPA10301-DPB12301 DPA10301-DPB13901 DPA10301-DPB14001 DPA10301-DPB14901 DPA10301-DPB15501 DPA10301-DPB16501 DPA10301-DPB17501 DPA10301-DPB18001 DPA10401-DPB10101 DPA10401-DPB10201; note = HLAs: DPA10401-DPB10202 DPA10401-DPB10402 DPA10401-DPB10501 DPA10401-DPB110501 DPA10401-DPB14901
PPFLWAGYELIPDK

SEQ ID NO: 6299 - protein, 20 aa, synthetic construct
  source 1..20: note = Seed: KEPPFLWMGYELHPDKWTVQ; note = HLAs: DPA10103-DPB10101 DPA10103-DPB10201 DPA10103-DPB10202 DPA10103-DPB10401 DPA10103-DPB10402 DPA10103-DPB10501 DPA10103-DPB110501 DPA10103-DPB112601 DPA10103-DPB11501 DPA10103-DPB11601 DPA10103-DPB11801 DPA10103-DPB11901 DPA10103-DPB12301 DPA10103-DPB13101 DPA10103-DPB13401 DPA10103-DPB13901 DPA10103-DPB14001 DPA10103-DPB14101 DPA10103-DPB14801 DPA10103-DPB14901 DPA10103-DPB15001 DPA10103-DPB15101 DPA10103-DPB15501 DPA10103-DPB15901 DPA10103-DPB18001 DPA10104-DPB10101 DPA10104-DPB11501 DPA10105-DPB10101 DPA10105-DPB10401 DPA10105-DPB11801 DPA10105-DPB15001 DPA10106-DPB10101 DPA10201-DPB10101 DPA10201-DPB10201 DPA10201-DPB10202 DPA10201-DPB10401 DPA10201-DPB10501 DPA10201-DPB110601 DPA10201-DPB11501 DPA10201-DPB11601 DPA10201-DPB11901 DPA10201-DPB13401 DPA10201-DPB15501 DPA10202-DPB10101 DPA10202-DPB10201 DPA10202-DPB10202 DPA10202-DPB10401 DPA10202-DPB10501 DPA10202-DPB110601 DPA10202-DPB11101 DPA10202-DPB11301 DPA10202-DPB11801 DPA10202-DPB11901 DPA10202-DPB13101 DPA10202-DPB13801; note = HLAs: DPA10202-DPB15501 DPA10202-DPB16501 DPA10301-DPB10101 DPA10301-DPB10201 DPA10301-DPB10202 DPA10301-DPB10401 DPA10301-DPB10402 DPA10301-DPB110501 DPA10301-DPB110601 DPA10301-DPB11101 DPA10301-DPB11301 DPA10301-DPB11801 DPA10301-DPB12301 DPA10301-DPB13901 DPA10301-DPB14001 DPA10301-DPB14901 DPA10301-DPB15501 DPA10301-DPB16501 DPA10301-DPB17501 DPA10301-DPB18001 DPA10401-DPB10101 DPA10401-DPB10201 DPA10401-DPB10202 DPA10401-DPB10402 DPA10401-DPB10501 DPA10401-DPB110501 DPA10401-DPB14901
KEPPYLWHGFELLPDKWTVQ

SEQ ID NO: 6300 - protein, 20 aa, synthetic construct
  source 1..20: note = Seed: KEPPFLWMGYELHPDKWTVQ; note = HLAs: DRB1_0101 DPA10103-DPB10101 DPA10103-DPB10201 DPA10103-DPB10202 DPA10103-DPB10401 DPA10103-DPB10402 DPA10103-DPB10501 DPA10103-DPB110501 DPA10103-DPB112601 DPA10103-DPB11501 DPA10103-DPB11601 DPA10103-DPB11801 DPA10103-DPB11901 DPA10103-DPB12301 DPA10103-DPB13101 DPA10103-DPB13401 DPA10103-DPB13901 DPA10103-DPB14001 DPA10103-DPB14101 DPA10103-DPB14801 DPA10103-DPB14901 DPA10103-DPB15001 DPA10103-DPB15101 DPA10103-DPB15501 DPA10103-DPB15901 DPA10103-DPB18001 DPA10104-DPB10101 DPA10104-DPB11501 DPA10105-DPB10101 DPA10105-DPB10401 DPA10105-DPB11801 DPA10105-DPB15001 DPA10106-DPB10101 DPA10201-DPB10101 DPA10201-DPB10201 DPA10201-DPB10202 DPA10201-DPB10401 DPA10201-DPB10501 DPA10201-DPB110601 DPA10201-DPB11501 DPA10201-DPB11601 DPA10201-DPB11901 DPA10201-DPB13401 DPA10201-DPB15501 DPA10202-DPB10101 DPA10202-DPB10201 DPA10202-DPB10202 DPA10202-DPB10401 DPA10202-DPB10501 DPA10202-DPB110601 DPA10202-DPB11101 DPA10202-DPB11301 DPA10202-DPB11801 DPA10202-DPB11901 DPA10202-DPB13101; note = HLAs: DPA10202-DPB13801 DPA10202-DPB15501 DPA10202-DPB16501 DPA10301-DPB10101 DPA10301-DPB10201 DPA10301-DPB10202 DPA10301-DPB10401 DPA10301-DPB10402 DPA10301-DPB110501 DPA10301-DPB110601 DPA10301-DPB11101 DPA10301-DPB11301 DPA10301-DPB11801 DPA10301-DPB12301 DPA10301-DPB13901 DPA10301-DPB14001 DPA10301-DPB14901 DPA10301-DPB15501 DPA10301-DPB16501 DPA10301-DPB17501 DPA10301-DPB18001 DPA10401-DPB10101 DPA10401-DPB10201 DPA10401-DPB10202 DPA10401-DPB10402 DPA10401-DPB10501 DPA10401-DPB110501 DPA10401-DPB14901
KEPPFLWTGWELVPDKWTVQ

SEQ ID NO: 6301 - protein, 20 aa, synthetic construct
  source 1..20: note = Seed: KEPPFLWMGYELHPDKWTVQ; note = HLAs: DRB1_0101 DRB1_1001 DPA10103-DPB10101 DPA10103-DPB10201 DPA10103-DPB10202 DPA10103-DPB10401 DPA10103-DPB10402 DPA10103-DPB10501 DPA10103-DPB110501 DPA10103-DPB112601 DPA10103-DPB11501 DPA10103-DPB11601 DPA10103-DPB11801 DPA10103-DPB11901 DPA10103-DPB12301 DPA10103-DPB13101 DPA10103-DPB13401 DPA10103-DPB13901 DPA10103-DPB14001 DPA10103-DPB14101 DPA10103-DPB14801 DPA10103-DPB14901 DPA10103-DPB15001 DPA10103-DPB15101 DPA10103-DPB15501 DPA10103-DPB15901 DPA10103-DPB18001 DPA10104-DPB10101 DPA10104-DPB11501 DPA10105-DPB10101 DPA10105-DPB10401 DPA10105-DPB11801 DPA10105-DPB15001 DPA10106-DPB10101 DPA10201-DPB10101 DPA10201-DPB10201 DPA10201-DPB10202 DPA10201-DPB10401 DPA10201-DPB10501 DPA10201-DPB110601 DPA10201-DPB11501 DPA10201-DPB11601 DPA10201-DPB11901 DPA10201-DPB13401 DPA10201-DPB15501 DPA10202-DPB10101 DPA10202-DPB10201 DPA10202-DPB10202 DPA10202-DPB10401 DPA10202-DPB10501 DPA10202-DPB110601 DPA10202-DPB11101 DPA10202-DPB11301 DPA10202-DPB11801 DPA10202-DPB11901; note = HLAs: DPA10202-DPB13101 DPA10202-DPB13801 DPA10202-DPB15501 DPA10202-DPB16501 DPA10301-DPB10101 DPA10301-DPB10201 DPA10301-DPB10202 DPA10301-DPB10401 DPA10301-DPB10402 DPA10301-DPB110501 DPA10301-DPB110601 DPA10301-DPB11101 DPA10301-DPB11301 DPA10301-DPB11801 DPA10301-DPB12301 DPA10301-DPB13901 DPA10301-DPB14001 DPA10301-DPB14901 DPA10301-DPB15501 DPA10301-DPB16501 DPA10301-DPB17501 DPA10301-DPB18001 DPA10401-DPB10101 DPA10401-DPB10201 DPA10401-DPB10202 DPA10401-DPB10402 DPA10401-DPB10501 DPA10401-DPB110501 DPA10401-DPB14901
KEPPFLWAGFELTPDKWTVQ

SEQ ID NO: 6302 - protein, 14 aa, synthetic construct
  source 1..14: note = Seed: PPFLWMGYELHPDK; note = HLAs: DPA10103-DPB10101 DPA10103-DPB10201 DPA10103-DPB10202 DPA10103-DPB10401 DPA10103-DPB112601 DPA10103-DPB11501 DPA10103-DPB11601 DPA10103-DPB11901 DPA10103-DPB12301 DPA10103-DPB13101 DPA10103-DPB13401 DPA10103-DPB13901 DPA10103-DPB14001 DPA10103-DPB14101 DPA10103-DPB14801 DPA10103-DPB15001 DPA10103-DPB15901 DPA10104-DPB10101 DPA10104-DPB11501 DPA10105-DPB10101 DPA10105-DPB10401 DPA10105-DPB15001 DPA10106-DPB10101 DPA10201-DPB10101 DPA10201-DPB110601 DPA10201-DPB11501 DPA10201-DPB11601 DPA10201-DPB11901 DPA10202-DPB10101 DPA10202-DPB10201 DPA10202-DPB10202 DPA10202-DPB10401 DPA10202-DPB110601 DPA10202-DPB11901 DPA10202-DPB13101 DPA10202-DPB16501 DPA10301-DPB10101 DPA10301-DPB10201 DPA10301-DPB10202 DPA10301-DPB10401 DPA10301-DPB10402 DPA10301-DPB110501 DPA10301-DPB110601 DPA10301-DPB11801 DPA10301-DPB12301 DPA10301-DPB13901 DPA10301-DPB14001 DPA10301-DPB14901 DPA10301-DPB15501 DPA10301-DPB16501 DPA10301-DPB17501 DPA10301-DPB18001 DPA10401-DPB10101 DPA10401-DPB10201; note = HLAs: DPA10401-DPB10202 DPA10401-DPB10402 DPA10401-DPB10501 DPA10401-DPB110501 DPA10401-DPB14901
PPFLWKGFELIPDK

SEQ ID NO: 6303 - protein, 14 aa, synthetic construct
  source 1..14: note = Seed: PPFLWMGYELHPDK; note = HLAs: DRB1_1001 DPA10103-DPB10101 DPA10103-DPB10201 DPA10103-DPB10202 DPA10103-DPB10401 DPA10103-DPB112601 DPA10103-DPB11501 DPA10103-DPB11601 DPA10103-DPB11901 DPA10103-DPB12301 DPA10103-DPB13101 DPA10103-DPB13401 DPA10103-DPB13901 DPA10103-DPB14001 DPA10103-DPB14101 DPA10103-DPB14801 DPA10103-DPB15001 DPA10103-DPB15901 DPA10104-DPB10101 DPA10104-DPB11501 DPA10105-DPB10101 DPA10105-DPB10401 DPA10105-DPB15001 DPA10106-DPB10101 DPA10201-DPB10101 DPA10201-DPB110601 DPA10201-DPB11501 DPA10201-DPB11601 DPA10201-DPB11901 DPA10202-DPB10101 DPA10202-DPB10201 DPA10202-DPB10202 DPA10202-DPB10401 DPA10202-DPB110601 DPA10202-DPB11901 DPA10202-DPB13101 DPA10202-DPB16501 DPA10301-DPB10101 DPA10301-DPB10201 DPA10301-DPB10202 DPA10301-DPB10401 DPA10301-DPB10402 DPA10301-DPB110501 DPA10301-DPB110601 DPA10301-DPB11801 DPA10301-DPB12301 DPA10301-DPB13901 DPA10301-DPB14001 DPA10301-DPB14901 DPA10301-DPB15501 DPA10301-DPB16501 DPA10301-DPB17501 DPA10301-DPB18001 DPA10401-DPB10101 DPA10401-DPB10201; note = HLAs: DPA10401-DPB10202 DPA10401-DPB10402 DPA10401-DPB10501 DPA10401-DPB110501 DPA10401-DPB14901
PPFLWIGYELVPDK

SEQ ID NO: 6304 - protein, 20 aa, synthetic construct
  source 1..20: note = Seed: KEPPFLWMGYELHPDKWTVQ; note = HLAs: DRB1_0101 DPA10103-DPB10101 DPA10103-DPB10201 DPA10103-DPB10202 DPA10103-DPB10401 DPA10103-DPB10402 DPA10103-DPB10501 DPA10103-DPB110501 DPA10103-DPB112601 DPA10103-DPB11501 DPA10103-DPB11601 DPA10103-DPB11801 DPA10103-DPB11901 DPA10103-DPB12301 DPA10103-DPB13101 DPA10103-DPB13401 DPA10103-DPB13901 DPA10103-DPB14001 DPA10103-DPB14101 DPA10103-DPB14801 DPA10103-DPB14901 DPA10103-DPB15001 DPA10103-DPB15101 DPA10103-DPB15501 DPA10103-DPB15901 DPA10103-DPB18001 DPA10104-DPB10101 DPA10104-DPB11501 DPA10105-DPB10101 DPA10105-DPB10401 DPA10105-DPB11801 DPA10105-DPB15001 DPA10106-DPB10101 DPA10201-DPB10101 DPA10201-DPB10201 DPA10201-DPB10202 DPA10201-DPB10401 DPA10201-DPB10501 DPA10201-DPB110601 DPA10201-DPB11501 DPA10201-DPB11601 DPA10201-DPB11901 DPA10201-DPB13401 DPA10201-DPB15501 DPA10202-DPB10101 DPA10202-DPB10201 DPA10202-DPB10202 DPA10202-DPB10401 DPA10202-DPB10501 DPA10202-DPB110601 DPA10202-DPB11101 DPA10202-DPB11301 DPA10202-DPB11801 DPA10202-DPB11901 DPA10202-DPB13101; note = HLAs: DPA10202-DPB13801 DPA10202-DPB15501 DPA10202-DPB16501 DPA10301-DPB10101 DPA10301-DPB10201 DPA10301-DPB10202 DPA10301-DPB10401 DPA10301-DPB10402 DPA10301-DPB110501 DPA10301-DPB110601 DPA10301-DPB11101 DPA10301-DPB11301 DPA10301-DPB11801 DPA10301-DPB12301 DPA10301-DPB13901 DPA10301-DPB14001 DPA10301-DPB14901 DPA10301-DPB15501 DPA10301-DPB16501 DPA10301-DPB17501 DPA10301-DPB18001 DPA10401-DPB10101 DPA10401-DPB10201 DPA10401-DPB10202 DPA10401-DPB10402 DPA10401-DPB10501 DPA10401-DPB110501 DPA10401-DPB14901
KEPPFLWAGFELFPDKWTVQ

SEQ ID NO: 6305 - protein, 14 aa, synthetic construct
  source 1..14: note = Seed: PPFLWMGYELHPDK; note = HLAs: DPA10103-DPB10101 DPA10103-DPB10201 DPA10103-DPB10202 DPA10103-DPB10401 DPA10103-DPB112601 DPA10103-DPB11501 DPA10103-DPB11601 DPA10103-DPB11901 DPA10103-DPB12301 DPA10103-DPB13101 DPA10103-DPB13401 DPA10103-DPB13901 DPA10103-DPB14001 DPA10103-DPB14101 DPA10103-DPB14801 DPA10103-DPB15001 DPA10103-DPB15901 DPA10104-DPB10101 DPA10104-DPB11501 DPA10105-DPB10101 DPA10105-DPB10401 DPA10105-DPB15001 DPA10106-DPB10101 DPA10201-DPB10101 DPA10201-DPB110601 DPA10201-DPB11501 DPA10201-DPB11601 DPA10201-DPB11901 DPA10202-DPB10101 DPA10202-DPB10201 DPA10202-DPB10202 DPA10202-DPB10401 DPA10202-DPB110601 DPA10202-DPB11901 DPA10202-DPB13101 DPA10202-DPB16501 DPA10301-DPB10101 DPA10301-DPB10201 DPA10301-DPB10202 DPA10301-DPB10401 DPA10301-DPB10402 DPA10301-DPB110501 DPA10301-DPB110601 DPA10301-DPB11801 DPA10301-DPB12301 DPA10301-DPB13901 DPA10301-DPB14001 DPA10301-DPB14901 DPA10301-DPB15501 DPA10301-DPB16501 DPA10301-DPB17501 DPA10301-DPB18001 DPA10401-DPB10101 DPA10401-DPB10201; note = HLAs: DPA10401-DPB10202 DPA10401-DPB10402 DPA10401-DPB10501 DPA10401-DPB110501 DPA10401-DPB14901
PPFLWNGFELFPDK

SEQ ID NO: 6306 - protein, 20 aa, synthetic construct
  source 1..20: note = Seed: KEPPFLWMGYELHPDKWTVQ; note = HLAs: DRB1_0101 DPA10103-DPB10101 DPA10103-DPB10201 DPA10103-DPB10202 DPA10103-DPB10401 DPA10103-DPB10402 DPA10103-DPB10501 DPA10103-DPB110501 DPA10103-DPB112601 DPA10103-DPB11501 DPA10103-DPB11601 DPA10103-DPB11801 DPA10103-DPB11901 DPA10103-DPB12301 DPA10103-DPB13101 DPA10103-DPB13401 DPA10103-DPB13901 DPA10103-DPB14001 DPA10103-DPB14101 DPA10103-DPB14801 DPA10103-DPB14901 DPA10103-DPB15001 DPA10103-DPB15101 DPA10103-DPB15501 DPA10103-DPB15901 DPA10103-DPB18001 DPA10104-DPB10101 DPA10104-DPB11501 DPA10105-DPB10101 DPA10105-DPB10401 DPA10105-DPB11801 DPA10105-DPB15001 DPA10106-DPB10101 DPA10201-DPB10101 DPA10201-DPB10201 DPA10201-DPB10202 DPA10201-DPB10401 DPA10201-DPB10501 DPA10201-DPB110601 DPA10201-DPB11501 DPA10201-DPB11601 DPA10201-DPB11901 DPA10201-DPB13401 DPA10201-DPB15501 DPA10202-DPB10101 DPA10202-DPB10201 DPA10202-DPB10202 DPA10202-DPB10401 DPA10202-DPB10501 DPA10202-DPB110601 DPA10202-DPB11101 DPA10202-DPB11301 DPA10202-DPB11801 DPA10202-DPB11901 DPA10202-DPB13101; note = HLAs: DPA10202-DPB13801 DPA10202-DPB15501 DPA10202-DPB16501 DPA10301-DPB10101 DPA10301-DPB10201 DPA10301-DPB10202 DPA10301-DPB10401 DPA10301-DPB10402 DPA10301-DPB110501 DPA10301-DPB110601 DPA10301-DPB11101 DPA10301-DPB11301 DPA10301-DPB11801 DPA10301-DPB12301 DPA10301-DPB13901 DPA10301-DPB14001 DPA10301-DPB14901 DPA10301-DPB15501 DPA10301-DPB16501 DPA10301-DPB17501 DPA10301-DPB18001 DPA10401-DPB10101 DPA10401-DPB10201 DPA10401-DPB10202 DPA10401-DPB10402 DPA10401-DPB10501 DPA10401-DPB110501 DPA10401-DPB14901
KEPPFLWAGYELLPDKWTVQ

SEQ ID NO: 6307 - protein, 20 aa, synthetic construct
  source 1..20: note = Seed: KEPPFLWMGYELHPDKWTVQ; note = HLAs: DPA10103-DPB10101 DPA10103-DPB10201 DPA10103-DPB10202 DPA10103-DPB10401 DPA10103-DPB10402 DPA10103-DPB10501 DPA10103-DPB110501 DPA10103-DPB112601 DPA10103-DPB11501 DPA10103-DPB11601 DPA10103-DPB11801 DPA10103-DPB11901 DPA10103-DPB12301 DPA10103-DPB13101 DPA10103-DPB13401 DPA10103-DPB13901 DPA10103-DPB14001 DPA10103-DPB14101 DPA10103-DPB14801 DPA10103-DPB14901 DPA10103-DPB15001 DPA10103-DPB15101 DPA10103-DPB15501 DPA10103-DPB15901 DPA10103-DPB18001 DPA10104-DPB10101 DPA10104-DPB11501 DPA10105-DPB10101 DPA10105-DPB10401 DPA10105-DPB11801 DPA10105-DPB15001 DPA10106-DPB10101 DPA10201-DPB10101 DPA10201-DPB10201 DPA10201-DPB10202 DPA10201-DPB10401 DPA10201-DPB10501 DPA10201-DPB110601 DPA10201-DPB11501 DPA10201-DPB11601 DPA10201-DPB11901 DPA10201-DPB13401 DPA10201-DPB15501 DPA10202-DPB10101 DPA10202-DPB10201 DPA10202-DPB10202 DPA10202-DPB10401 DPA10202-DPB10501 DPA10202-DPB110601 DPA10202-DPB11101 DPA10202-DPB11301 DPA10202-DPB11801 DPA10202-DPB11901 DPA10202-DPB13101 DPA10202-DPB13801; note = HLAs: DPA10202-DPB15501 DPA10202-DPB16501 DPA10301-DPB10101 DPA10301-DPB10201 DPA10301-DPB10202 DPA10301-DPB10401 DPA10301-DPB10402 DPA10301-DPB110501 DPA10301-DPB110601 DPA10301-DPB11101 DPA10301-DPB11301 DPA10301-DPB11801 DPA10301-DPB12301 DPA10301-DPB13901 DPA10301-DPB14001 DPA10301-DPB14901 DPA10301-DPB15501 DPA10301-DPB16501 DPA10301-DPB17501 DPA10301-DPB18001 DPA10401-DPB10101 DPA10401-DPB10201 DPA10401-DPB10202 DPA10401-DPB10402 DPA10401-DPB10501 DPA10401-DPB110501 DPA10401-DPB14901
KEPPILWSGFELLPDKWTVQ

SEQ ID NO: 6308 - protein, 20 aa, synthetic construct
  source 1..20: note = Seed: KEPPFLWMGYELHPDKWTVQ; note = HLAs: DRB1_0101 DRB1_1001 DPA10103-DPB10101 DPA10103-DPB10201 DPA10103-DPB10202 DPA10103-DPB10401 DPA10103-DPB10402 DPA10103-DPB10501 DPA10103-DPB110501 DPA10103-DPB112601 DPA10103-DPB11501 DPA10103-DPB11601 DPA10103-DPB11801 DPA10103-DPB11901 DPA10103-DPB12301 DPA10103-DPB13101 DPA10103-DPB13401 DPA10103-DPB13901 DPA10103-DPB14001 DPA10103-DPB14101 DPA10103-DPB14801 DPA10103-DPB14901 DPA10103-DPB15001 DPA10103-DPB15101 DPA10103-DPB15501 DPA10103-DPB15901 DPA10103-DPB18001 DPA10104-DPB10101 DPA10104-DPB11501 DPA10105-DPB10101 DPA10105-DPB10401 DPA10105-DPB11801 DPA10105-DPB15001 DPA10106-DPB10101 DPA10201-DPB10101 DPA10201-DPB10201 DPA10201-DPB10202 DPA10201-DPB10401 DPA10201-DPB10501 DPA10201-DPB110601 DPA10201-DPB11501 DPA10201-DPB11601 DPA10201-DPB11901 DPA10201-DPB13401 DPA10201-DPB15501 DPA10202-DPB10101 DPA10202-DPB10201 DPA10202-DPB10202 DPA10202-DPB10401 DPA10202-DPB10501 DPA10202-DPB110601 DPA10202-DPB11101 DPA10202-DPB11301 DPA10202-DPB11801 DPA10202-DPB11901; note = HLAs: DPA10202-DPB13101 DPA10202-DPB13801 DPA10202-DPB15501 DPA10202-DPB16501 DPA10301-DPB10101 DPA10301-DPB10201 DPA10301-DPB10202 DPA10301-DPB10401 DPA10301-DPB10402 DPA10301-DPB110501 DPA10301-DPB110601 DPA10301-DPB11101 DPA10301-DPB11301 DPA10301-DPB11801 DPA10301-DPB12301 DPA10301-DPB13901 DPA10301-DPB14001 DPA10301-DPB14901 DPA10301-DPB15501 DPA10301-DPB16501 DPA10301-DPB17501 DPA10301-DPB18001 DPA10401-DPB10101 DPA10401-DPB10201 DPA10401-DPB10202 DPA10401-DPB10402 DPA10401-DPB10501 DPA10401-DPB110501 DPA10401-DPB14901
KEPPYLWAGFELVPDKWTVQ

SEQ ID NO: 6309 - protein, 20 aa, synthetic construct
  source 1..20: note = Seed: KEPPFLWMGYELHPDKWTVQ; note = HLAs: DRB1_0101 DPA10103-DPB10101 DPA10103-DPB10201 DPA10103-DPB10202 DPA10103-DPB10401 DPA10103-DPB10402 DPA10103-DPB10501 DPA10103-DPB110501 DPA10103-DPB112601 DPA10103-DPB11501 DPA10103-DPB11601 DPA10103-DPB11801 DPA10103-DPB11901 DPA10103-DPB12301 DPA10103-DPB13101 DPA10103-DPB13401 DPA10103-DPB13901 DPA10103-DPB14001 DPA10103-DPB14101 DPA10103-DPB14801 DPA10103-DPB14901 DPA10103-DPB15001 DPA10103-DPB15101 DPA10103-DPB15501 DPA10103-DPB15901 DPA10103-DPB18001 DPA10104-DPB10101 DPA10104-DPB11501 DPA10105-DPB10101 DPA10105-DPB10401 DPA10105-DPB11801 DPA10105-DPB15001 DPA10106-DPB10101 DPA10201-DPB10101 DPA10201-DPB10201 DPA10201-DPB10202 DPA10201-DPB10401 DPA10201-DPB10501 DPA10201-DPB110601 DPA10201-DPB11501 DPA10201-DPB11601 DPA10201-DPB11901 DPA10201-DPB13401 DPA10201-DPB15501 DPA10202-DPB10101 DPA10202-DPB10201 DPA10202-DPB10202 DPA10202-DPB10401 DPA10202-DPB10501 DPA10202-DPB110601 DPA10202-DPB11101 DPA10202-DPB11301 DPA10202-DPB11801 DPA10202-DPB11901 DPA10202-DPB13101; note = HLAs: DPA10202-DPB13801 DPA10202-DPB15501 DPA10202-DPB16501 DPA10301-DPB10101 DPA10301-DPB10201 DPA10301-DPB10202 DPA10301-DPB10401 DPA10301-DPB10402 DPA10301-DPB110501 DPA10301-DPB110601 DPA10301-DPB11101 DPA10301-DPB11301 DPA10301-DPB11801 DPA10301-DPB12301 DPA10301-DPB13901 DPA10301-DPB14001 DPA10301-DPB14901 DPA10301-DPB15501 DPA10301-DPB16501 DPA10301-DPB17501 DPA10301-DPB18001 DPA10401-DPB10101 DPA10401-DPB10201 DPA10401-DPB10202 DPA10401-DPB10402 DPA10401-DPB10501 DPA10401-DPB110501 DPA10401-DPB14901
KEPPFLWTGWELLPDKWTVQ

SEQ ID NO: 6310 - protein, 20 aa, synthetic construct
  source 1..20: note = Seed: KEPPFLWMGYELHPDKWTVQ; note = HLAs: DRB1_0101 DPA10103-DPB10101 DPA10103-DPB10201 DPA10103-DPB10202 DPA10103-DPB10401 DPA10103-DPB10402 DPA10103-DPB10501 DPA10103-DPB110501 DPA10103-DPB112601 DPA10103-DPB11501 DPA10103-DPB11601 DPA10103-DPB11801 DPA10103-DPB11901 DPA10103-DPB12301 DPA10103-DPB13101 DPA10103-DPB13401 DPA10103-DPB13901 DPA10103-DPB14001 DPA10103-DPB14101 DPA10103-DPB14801 DPA10103-DPB14901 DPA10103-DPB15001 DPA10103-DPB15101 DPA10103-DPB15501 DPA10103-DPB15901 DPA10103-DPB18001 DPA10104-DPB10101 DPA10104-DPB11501 DPA10105-DPB10101 DPA10105-DPB10401 DPA10105-DPB11801 DPA10105-DPB15001 DPA10106-DPB10101 DPA10201-DPB10101 DPA10201-DPB10201 DPA10201-DPB10202 DPA10201-DPB10401 DPA10201-DPB10501 DPA10201-DPB110601 DPA10201-DPB11501 DPA10201-DPB11601 DPA10201-DPB11901 DPA10201-DPB13401 DPA10201-DPB15501 DPA10202-DPB10101 DPA10202-DPB10201 DPA10202-DPB10202 DPA10202-DPB10401 DPA10202-DPB10501 DPA10202-DPB110601 DPA10202-DPB11101 DPA10202-DPB11301 DPA10202-DPB11801 DPA10202-DPB11901 DPA10202-DPB13101; note = HLAs: DPA10202-DPB13801 DPA10202-DPB15501 DPA10202-DPB16501 DPA10301-DPB10101 DPA10301-DPB10201 DPA10301-DPB10202 DPA10301-DPB10401 DPA10301-DPB10402 DPA10301-DPB110501 DPA10301-DPB110601 DPA10301-DPB11101 DPA10301-DPB11301 DPA10301-DPB11801 DPA10301-DPB12301 DPA10301-DPB13901 DPA10301-DPB14001 DPA10301-DPB14901 DPA10301-DPB15501 DPA10301-DPB16501 DPA10301-DPB17501 DPA10301-DPB18001 DPA10401-DPB10101 DPA10401-DPB10201 DPA10401-DPB10202 DPA10401-DPB10402 DPA10401-DPB10501 DPA10401-DPB110501 DPA10401-DPB14901
KEPPFLWVGFELLPDKWTVQ

SEQ ID NO: 6311 - protein, 14 aa, synthetic construct
  source 1..14: note = Seed: PPFLWMGYELHPDK; note = HLAs: DRB1_1001 DPA10103-DPB10101 DPA10103-DPB10201 DPA10103-DPB10202 DPA10103-DPB10401 DPA10103-DPB112601 DPA10103-DPB11501 DPA10103-DPB11601 DPA10103-DPB11901 DPA10103-DPB12301 DPA10103-DPB13101 DPA10103-DPB13401 DPA10103-DPB13901 DPA10103-DPB14001 DPA10103-DPB14101 DPA10103-DPB14801 DPA10103-DPB15001 DPA10103-DPB15901 DPA10104-DPB10101 DPA10104-DPB11501 DPA10105-DPB10101 DPA10105-DPB10401 DPA10105-DPB15001 DPA10106-DPB10101 DPA10201-DPB10101 DPA10201-DPB110601 DPA10201-DPB11501 DPA10201-DPB11601 DPA10201-DPB11901 DPA10202-DPB10101 DPA10202-DPB10201 DPA10202-DPB10202 DPA10202-DPB10401 DPA10202-DPB110601 DPA10202-DPB11901 DPA10202-DPB13101 DPA10202-DPB16501 DPA10301-DPB10101 DPA10301-DPB10201 DPA10301-DPB10202 DPA10301-DPB10401 DPA10301-DPB10402 DPA10301-DPB110501 DPA10301-DPB110601 DPA10301-DPB11801 DPA10301-DPB12301 DPA10301-DPB13901 DPA10301-DPB14001 DPA10301-DPB14901 DPA10301-DPB15501 DPA10301-DPB16501 DPA10301-DPB17501 DPA10301-DPB18001 DPA10401-DPB10101 DPA10401-DPB10201; note = HLAs: DPA10401-DPB10202 DPA10401-DPB10402 DPA10401-DPB10501 DPA10401-DPB110501 DPA10401-DPB14901
PPFLWQGFELMPDK

SEQ ID NO: 6312 - protein, 20 aa, synthetic construct
  source 1..20: note = Seed: KEPPFLWMGYELHPDKWTVQ; note = HLAs: DRB1_0101 DPA10103-DPB10101 DPA10103-DPB10201 DPA10103-DPB10202 DPA10103-DPB10401 DPA10103-DPB10402 DPA10103-DPB10501 DPA10103-DPB110501 DPA10103-DPB112601 DPA10103-DPB11501 DPA10103-DPB11601 DPA10103-DPB11801 DPA10103-DPB11901 DPA10103-DPB12301 DPA10103-DPB13101 DPA10103-DPB13401 DPA10103-DPB13901 DPA10103-DPB14001 DPA10103-DPB14101 DPA10103-DPB14801 DPA10103-DPB14901 DPA10103-DPB15001 DPA10103-DPB15101 DPA10103-DPB15501 DPA10103-DPB15901 DPA10103-DPB18001 DPA10104-DPB10101 DPA10104-DPB11501 DPA10105-DPB10101 DPA10105-DPB10401 DPA10105-DPB11801 DPA10105-DPB15001 DPA10106-DPB10101 DPA10201-DPB10101 DPA10201-DPB10201 DPA10201-DPB10202 DPA10201-DPB10401 DPA10201-DPB10501 DPA10201-DPB110601 DPA10201-DPB11501 DPA10201-DPB11601 DPA10201-DPB11901 DPA10201-DPB13401 DPA10201-DPB15501 DPA10202-DPB10101 DPA10202-DPB10201 DPA10202-DPB10202 DPA10202-DPB10401 DPA10202-DPB10501 DPA10202-DPB110601 DPA10202-DPB11101 DPA10202-DPB11301 DPA10202-DPB11801 DPA10202-DPB11901 DPA10202-DPB13101; note = HLAs: DPA10202-DPB13801 DPA10202-DPB15501 DPA10202-DPB16501 DPA10301-DPB10101 DPA10301-DPB10201 DPA10301-DPB10202 DPA10301-DPB10401 DPA10301-DPB10402 DPA10301-DPB110501 DPA10301-DPB110601 DPA10301-DPB11101 DPA10301-DPB11301 DPA10301-DPB11801 DPA10301-DPB12301 DPA10301-DPB13901 DPA10301-DPB14001 DPA10301-DPB14901 DPA10301-DPB15501 DPA10301-DPB16501 DPA10301-DPB17501 DPA10301-DPB18001 DPA10401-DPB10101 DPA10401-DPB10201 DPA10401-DPB10202 DPA10401-DPB10402 DPA10401-DPB10501 DPA10401-DPB110501 DPA10401-DPB14901
KEPPFLWAGYELIPDKWTVQ

SEQ ID NO: 6313 - protein, 20 aa, synthetic construct
  source 1..20: note = Seed: KEPPFLWMGYELHPDKWTVQ; note = HLAs: DRB1_0101 DPA10103-DPB10101 DPA10103-DPB10201 DPA10103-DPB10202 DPA10103-DPB10401 DPA10103-DPB10402 DPA10103-DPB10501 DPA10103-DPB110501 DPA10103-DPB112601 DPA10103-DPB11501 DPA10103-DPB11601 DPA10103-DPB11801 DPA10103-DPB11901 DPA10103-DPB12301 DPA10103-DPB13101 DPA10103-DPB13401 DPA10103-DPB13901 DPA10103-DPB14001 DPA10103-DPB14101 DPA10103-DPB14801 DPA10103-DPB14901 DPA10103-DPB15001 DPA10103-DPB15101 DPA10103-DPB15501 DPA10103-DPB15901 DPA10103-DPB18001 DPA10104-DPB10101 DPA10104-DPB11501 DPA10105-DPB10101 DPA10105-DPB10401 DPA10105-DPB11801 DPA10105-DPB15001 DPA10106-DPB10101 DPA10201-DPB10101 DPA10201-DPB10201 DPA10201-DPB10202 DPA10201-DPB10401 DPA10201-DPB10501 DPA10201-DPB110601 DPA10201-DPB11501 DPA10201-DPB11601 DPA10201-DPB11901 DPA10201-DPB13401 DPA10201-DPB15501 DPA10202-DPB10101 DPA10202-DPB10201 DPA10202-DPB10202 DPA10202-DPB10401 DPA10202-DPB10501 DPA10202-DPB110601 DPA10202-DPB11101 DPA10202-DPB11301 DPA10202-DPB11801 DPA10202-DPB11901 DPA10202-DPB13101; note = HLAs: DPA10202-DPB13801 DPA10202-DPB15501 DPA10202-DPB16501 DPA10301-DPB10101 DPA10301-DPB10201 DPA10301-DPB10202 DPA10301-DPB10401 DPA10301-DPB10402 DPA10301-DPB110501 DPA10301-DPB110601 DPA10301-DPB11101 DPA10301-DPB11301 DPA10301-DPB11801 DPA10301-DPB12301 DPA10301-DPB13901 DPA10301-DPB14001 DPA10301-DPB14901 DPA10301-DPB15501 DPA10301-DPB16501 DPA10301-DPB17501 DPA10301-DPB18001 DPA10401-DPB10101 DPA10401-DPB10201 DPA10401-DPB10202 DPA10401-DPB10402 DPA10401-DPB10501 DPA10401-DPB110501 DPA10401-DPB14901
KEPPWLWSGFELVPDKWTVQ

SEQ ID NO: 6314 - protein, 14 aa, synthetic construct
  source 1..14: note = Seed: PPFLWMGYELHPDK; note = HLAs: DPA10103-DPB10101 DPA10103-DPB10201 DPA10103-DPB10202 DPA10103-DPB10401 DPA10103-DPB112601 DPA10103-DPB11501 DPA10103-DPB11601 DPA10103-DPB11901 DPA10103-DPB12301 DPA10103-DPB13101 DPA10103-DPB13401 DPA10103-DPB13901 DPA10103-DPB14001 DPA10103-DPB14101 DPA10103-DPB14801 DPA10103-DPB15001 DPA10103-DPB15901 DPA10104-DPB10101 DPA10104-DPB11501 DPA10105-DPB10101 DPA10105-DPB10401 DPA10105-DPB15001 DPA10106-DPB10101 DPA10201-DPB10101 DPA10201-DPB110601 DPA10201-DPB11501 DPA10201-DPB11601 DPA10201-DPB11901 DPA10202-DPB10101 DPA10202-DPB10201 DPA10202-DPB10202 DPA10202-DPB10401 DPA10202-DPB110601 DPA10202-DPB11901 DPA10202-DPB13101 DPA10202-DPB16501 DPA10301-DPB10101 DPA10301-DPB10201 DPA10301-DPB10202 DPA10301-DPB10401 DPA10301-DPB10402 DPA10301-DPB110501 DPA10301-DPB110601 DPA10301-DPB11801 DPA10301-DPB12301 DPA10301-DPB13901 DPA10301-DPB14001 DPA10301-DPB14901 DPA10301-DPB15501 DPA10301-DPB16501 DPA10301-DPB17501 DPA10301-DPB18001 DPA10401-DPB10101 DPA10401-DPB10201; note = HLAs: DPA10401-DPB10202 DPA10401-DPB10402 DPA10401-DPB10501 DPA10401-DPB110501 DPA10401-DPB14901
PPLLWAGFELIPDK

SEQ ID NO: 6315 - protein, 20 aa, synthetic construct
  source 1..20: note = Seed: KEPPFLWMGYELHPDKWTVQ; note = HLAs: DRB1_0101 DPA10103-DPB10101 DPA10103-DPB10201 DPA10103-DPB10202 DPA10103-DPB10401 DPA10103-DPB10402 DPA10103-DPB10501 DPA10103-DPB110501 DPA10103-DPB112601 DPA10103-DPB11501 DPA10103-DPB11601 DPA10103-DPB11801 DPA10103-DPB11901 DPA10103-DPB12301 DPA10103-DPB13101 DPA10103-DPB13401 DPA10103-DPB13901 DPA10103-DPB14001 DPA10103-DPB14101 DPA10103-DPB14801 DPA10103-DPB14901 DPA10103-DPB15001 DPA10103-DPB15101 DPA10103-DPB15501 DPA10103-DPB15901 DPA10103-DPB18001 DPA10104-DPB10101 DPA10104-DPB11501 DPA10105-DPB10101 DPA10105-DPB10401 DPA10105-DPB11801 DPA10105-DPB15001 DPA10106-DPB10101 DPA10201-DPB10101 DPA10201-DPB10201 DPA10201-DPB10202 DPA10201-DPB10401 DPA10201-DPB10501 DPA10201-DPB110601 DPA10201-DPB11501 DPA10201-DPB11601 DPA10201-DPB11901 DPA10201-DPB13401 DPA10201-DPB15501 DPA10202-DPB10101 DPA10202-DPB10201 DPA10202-DPB10202 DPA10202-DPB10401 DPA10202-DPB10501 DPA10202-DPB110601 DPA10202-DPB11101 DPA10202-DPB11301 DPA10202-DPB11801 DPA10202-DPB11901 DPA10202-DPB13101; note = HLAs: DPA10202-DPB13801 DPA10202-DPB15501 DPA10202-DPB16501 DPA10301-DPB10101 DPA10301-DPB10201 DPA10301-DPB10202 DPA10301-DPB10401 DPA10301-DPB10402 DPA10301-DPB110501 DPA10301-DPB110601 DPA10301-DPB11101 DPA10301-DPB11301 DPA10301-DPB11801 DPA10301-DPB12301 DPA10301-DPB13901 DPA10301-DPB14001 DPA10301-DPB14901 DPA10301-DPB15501 DPA10301-DPB16501 DPA10301-DPB17501 DPA10301-DPB18001 DPA10401-DPB10101 DPA10401-DPB10201 DPA10401-DPB10202 DPA10401-DPB10402 DPA10401-DPB10501 DPA10401-DPB110501 DPA10401-DPB14901
KEPPFLWHGFELAPDKWTVQ

SEQ ID NO: 6316 - protein, 14 aa, synthetic construct
  source 1..14: note = Seed: PPFLWMGYELHPDK; note = HLAs: DPA10103-DPB10101 DPA10103-DPB10201 DPA10103-DPB10202 DPA10103-DPB10401 DPA10103-DPB112601 DPA10103-DPB11501 DPA10103-DPB11601 DPA10103-DPB11901 DPA10103-DPB12301 DPA10103-DPB13101 DPA10103-DPB13401 DPA10103-DPB13901 DPA10103-DPB14001 DPA10103-DPB14101 DPA10103-DPB14801 DPA10103-DPB15001 DPA10103-DPB15901 DPA10104-DPB10101 DPA10104-DPB11501 DPA10105-DPB10101 DPA10105-DPB10401 DPA10105-DPB15001 DPA10106-DPB10101 DPA10201-DPB10101 DPA10201-DPB110601 DPA10201-DPB11501 DPA10201-DPB11601 DPA10201-DPB11901 DPA10202-DPB10101 DPA10202-DPB10201 DPA10202-DPB10202 DPA10202-DPB10401 DPA10202-DPB110601 DPA10202-DPB11901 DPA10202-DPB13101 DPA10202-DPB16501 DPA10301-DPB10101 DPA10301-DPB10201 DPA10301-DPB10202 DPA10301-DPB10401 DPA10301-DPB10402 DPA10301-DPB110501 DPA10301-DPB110601 DPA10301-DPB11801 DPA10301-DPB12301 DPA10301-DPB13901 DPA10301-DPB14001 DPA10301-DPB14901 DPA10301-DPB15501 DPA10301-DPB16501 DPA10301-DPB17501 DPA10301-DPB18001 DPA10401-DPB10101 DPA10401-DPB10201; note = HLAs: DPA10401-DPB10202 DPA10401-DPB10402 DPA10401-DPB10501 DPA10401-DPB110501 DPA10401-DPB14901
PPFLWKGFELVPDK

SEQ ID NO: 6317 - protein, 14 aa, synthetic construct
  source 1..14: note = Seed: PPFLWMGYELHPDK; note = HLAs: DRB1_1001 DPA10103-DPB10101 DPA10103-DPB10201 DPA10103-DPB10202 DPA10103-DPB10401 DPA10103-DPB112601 DPA10103-DPB11501 DPA10103-DPB11601 DPA10103-DPB11901 DPA10103-DPB12301 DPA10103-DPB13101 DPA10103-DPB13401 DPA10103-DPB13901 DPA10103-DPB14001 DPA10103-DPB14101 DPA10103-DPB14801 DPA10103-DPB15001 DPA10103-DPB15901 DPA10104-DPB10101 DPA10104-DPB11501 DPA10105-DPB10101 DPA10105-DPB10401 DPA10105-DPB15001 DPA10106-DPB10101 DPA10201-DPB10101 DPA10201-DPB110601 DPA10201-DPB11501 DPA10201-DPB11601 DPA10201-DPB11901 DPA10202-DPB10101 DPA10202-DPB10201 DPA10202-DPB10202 DPA10202-DPB10401 DPA10202-DPB110601 DPA10202-DPB11901 DPA10202-DPB13101 DPA10202-DPB16501 DPA10301-DPB10101 DPA10301-DPB10201 DPA10301-DPB10202 DPA10301-DPB10401 DPA10301-DPB10402 DPA10301-DPB110501 DPA10301-DPB110601 DPA10301-DPB11801 DPA10301-DPB12301 DPA10301-DPB13901 DPA10301-DPB14001 DPA10301-DPB14901 DPA10301-DPB15501 DPA10301-DPB16501 DPA10301-DPB17501 DPA10301-DPB18001 DPA10401-DPB10101 DPA10401-DPB10201; note = HLAs: DPA10401-DPB10202 DPA10401-DPB10402 DPA10401-DPB10501 DPA10401-DPB110501 DPA10401-DPB14901
PPFLWVGFELAPDK

SEQ ID NO: 6318 - protein, 14 aa, synthetic construct
  source 1..14: note = Seed: PPFLWMGYELHPDK; note = HLAs: DRB1_1001 DPA10103-DPB10101 DPA10103-DPB10201 DPA10103-DPB10202 DPA10103-DPB10401 DPA10103-DPB112601 DPA10103-DPB11501 DPA10103-DPB11601 DPA10103-DPB11901 DPA10103-DPB12301 DPA10103-DPB13101 DPA10103-DPB13401 DPA10103-DPB13901 DPA10103-DPB14001 DPA10103-DPB14101 DPA10103-DPB14801 DPA10103-DPB15001 DPA10103-DPB15901 DPA10104-DPB10101 DPA10104-DPB11501 DPA10105-DPB10101 DPA10105-DPB10401 DPA10105-DPB15001 DPA10106-DPB10101 DPA10201-DPB10101 DPA10201-DPB110601 DPA10201-DPB11501 DPA10201-DPB11601 DPA10201-DPB11901 DPA10202-DPB10101 DPA10202-DPB10201 DPA10202-DPB10202 DPA10202-DPB10401 DPA10202-DPB110601 DPA10202-DPB11901 DPA10202-DPB13101 DPA10202-DPB16501 DPA10301-DPB10101 DPA10301-DPB10201 DPA10301-DPB10202 DPA10301-DPB10401 DPA10301-DPB10402 DPA10301-DPB110501 DPA10301-DPB110601 DPA10301-DPB11801 DPA10301-DPB12301 DPA10301-DPB13901 DPA10301-DPB14001 DPA10301-DPB14901 DPA10301-DPB15501 DPA10301-DPB16501 DPA10301-DPB17501 DPA10301-DPB18001 DPA10401-DPB10101 DPA10401-DPB10201; note = HLAs: DPA10401-DPB10202 DPA10401-DPB10402 DPA10401-DPB10501 DPA10401-DPB110501 DPA10401-DPB14901
PPFLWSGFELNPDK

SEQ ID NO: 6319 - protein, 14 aa, synthetic construct
  source 1..14: note = Seed: PPFLWMGYELHPDK; note = HLAs: DPA10103-DPB10101 DPA10103-DPB10201 DPA10103-DPB10202 DPA10103-DPB10401 DPA10103-DPB112601 DPA10103-DPB11501 DPA10103-DPB11601 DPA10103-DPB11901 DPA10103-DPB12301 DPA10103-DPB13101 DPA10103-DPB13401 DPA10103-DPB13901 DPA10103-DPB14001 DPA10103-DPB14101 DPA10103-DPB14801 DPA10103-DPB15001 DPA10103-DPB15901 DPA10104-DPB10101 DPA10104-DPB11501 DPA10105-DPB10101 DPA10105-DPB10401 DPA10105-DPB15001 DPA10106-DPB10101 DPA10201-DPB10101 DPA10201-DPB110601 DPA10201-DPB11501 DPA10201-DPB11601 DPA10201-DPB11901 DPA10202-DPB10101 DPA10202-DPB10201 DPA10202-DPB10202 DPA10202-DPB10401 DPA10202-DPB110601 DPA10202-DPB11901 DPA10202-DPB13101 DPA10202-DPB16501 DPA10301-DPB10101 DPA10301-DPB10201 DPA10301-DPB10202 DPA10301-DPB10401 DPA10301-DPB10402 DPA10301-DPB110501 DPA10301-DPB110601 DPA10301-DPB11801 DPA10301-DPB12301 DPA10301-DPB13901 DPA10301-DPB14001 DPA10301-DPB14901 DPA10301-DPB15501 DPA10301-DPB16501 DPA10301-DPB17501 DPA10301-DPB18001 DPA10401-DPB10101 DPA10401-DPB10201; note = HLAs: DPA10401-DPB10202 DPA10401-DPB10402 DPA10401-DPB10501 DPA10401-DPB110501 DPA10401-DPB14901
PPFLWSGWELIPDK

SEQ ID NO: 6320 - protein, 20 aa, synthetic construct
  source 1..20: note = Seed: KEPPFLWMGYELHPDKWTVQ; note = HLAs: DRB1_0101 DPA10103-DPB10101 DPA10103-DPB10201 DPA10103-DPB10202 DPA10103-DPB10401 DPA10103-DPB10402 DPA10103-DPB10501 DPA10103-DPB110501 DPA10103-DPB112601 DPA10103-DPB11501 DPA10103-DPB11601 DPA10103-DPB11801 DPA10103-DPB11901 DPA10103-DPB12301 DPA10103-DPB13101 DPA10103-DPB13401 DPA10103-DPB13901 DPA10103-DPB14001 DPA10103-DPB14101 DPA10103-DPB14801 DPA10103-DPB14901 DPA10103-DPB15001 DPA10103-DPB15101 DPA10103-DPB15501 DPA10103-DPB15901 DPA10103-DPB18001 DPA10104-DPB10101 DPA10104-DPB11501 DPA10105-DPB10101 DPA10105-DPB10401 DPA10105-DPB11801 DPA10105-DPB15001 DPA10106-DPB10101 DPA10201-DPB10101 DPA10201-DPB10201 DPA10201-DPB10202 DPA10201-DPB10401 DPA10201-DPB10501 DPA10201-DPB110601 DPA10201-DPB11501 DPA10201-DPB11601 DPA10201-DPB11901 DPA10201-DPB13401 DPA10201-DPB15501 DPA10202-DPB10101 DPA10202-DPB10201 DPA10202-DPB10202 DPA10202-DPB10401 DPA10202-DPB10501 DPA10202-DPB110601 DPA10202-DPB11101 DPA10202-DPB11301 DPA10202-DPB11801 DPA10202-DPB11901 DPA10202-DPB13101; note = HLAs: DPA10202-DPB13801 DPA10202-DPB15501 DPA10202-DPB16501 DPA10301-DPB10101 DPA10301-DPB10201 DPA10301-DPB10202 DPA10301-DPB10401 DPA10301-DPB10402 DPA10301-DPB110501 DPA10301-DPB110601 DPA10301-DPB11101 DPA10301-DPB11301 DPA10301-DPB11801 DPA10301-DPB12301 DPA10301-DPB13901 DPA10301-DPB14001 DPA10301-DPB14901 DPA10301-DPB15501 DPA10301-DPB16501 DPA10301-DPB17501 DPA10301-DPB18001 DPA10401-DPB10101 DPA10401-DPB10201 DPA10401-DPB10202 DPA10401-DPB10402 DPA10401-DPB10501 DPA10401-DPB110501 DPA10401-DPB14901
KEPPFLWAGFELYPDKWTVQ

SEQ ID NO: 6321 - protein, 20 aa, synthetic construct
  source 1..20: note = Seed: KEPPFLWMGYELHPDKWTVQ; note = HLAs: DRB1_0101 DRB1_1001 DPA10103-DPB10101 DPA10103-DPB10201 DPA10103-DPB10202 DPA10103-DPB10401 DPA10103-DPB10402 DPA10103-DPB10501 DPA10103-DPB110501 DPA10103-DPB112601 DPA10103-DPB11501 DPA10103-DPB11601 DPA10103-DPB11801 DPA10103-DPB11901 DPA10103-DPB12301 DPA10103-DPB13101 DPA10103-DPB13401 DPA10103-DPB13901 DPA10103-DPB14001 DPA10103-DPB14101 DPA10103-DPB14801 DPA10103-DPB14901 DPA10103-DPB15001 DPA10103-DPB15101 DPA10103-DPB15501 DPA10103-DPB15901 DPA10103-DPB18001 DPA10104-DPB10101 DPA10104-DPB11501 DPA10105-DPB10101 DPA10105-DPB10401 DPA10105-DPB11801 DPA10105-DPB15001 DPA10106-DPB10101 DPA10201-DPB10101 DPA10201-DPB10201 DPA10201-DPB10202 DPA10201-DPB10401 DPA10201-DPB10501 DPA10201-DPB110601 DPA10201-DPB11501 DPA10201-DPB11601 DPA10201-DPB11901 DPA10201-DPB13401 DPA10201-DPB15501 DPA10202-DPB10101 DPA10202-DPB10201 DPA10202-DPB10202 DPA10202-DPB10401 DPA10202-DPB10501 DPA10202-DPB110601 DPA10202-DPB11101 DPA10202-DPB11301 DPA10202-DPB11801 DPA10202-DPB11901; note = HLAs: DPA10202-DPB13101 DPA10202-DPB13801 DPA10202-DPB15501 DPA10202-DPB16501 DPA10301-DPB10101 DPA10301-DPB10201 DPA10301-DPB10202 DPA10301-DPB10401 DPA10301-DPB10402 DPA10301-DPB110501 DPA10301-DPB110601 DPA10301-DPB11101 DPA10301-DPB11301 DPA10301-DPB11801 DPA10301-DPB12301 DPA10301-DPB13901 DPA10301-DPB14001 DPA10301-DPB14901 DPA10301-DPB15501 DPA10301-DPB16501 DPA10301-DPB17501 DPA10301-DPB18001 DPA10401-DPB10101 DPA10401-DPB10201 DPA10401-DPB10202 DPA10401-DPB10402 DPA10401-DPB10501 DPA10401-DPB110501 DPA10401-DPB14901
KEPPFLWEGFELAPDKWTVQ

SEQ ID NO: 6322 - protein, 14 aa, synthetic construct
  source 1..14: note = Seed: PPFLWMGYELHPDK; note = HLAs: DPA10103-DPB10101 DPA10103-DPB10201 DPA10103-DPB10202 DPA10103-DPB10401 DPA10103-DPB112601 DPA10103-DPB11501 DPA10103-DPB11601 DPA10103-DPB11901 DPA10103-DPB12301 DPA10103-DPB13101 DPA10103-DPB13401 DPA10103-DPB13901 DPA10103-DPB14001 DPA10103-DPB14101 DPA10103-DPB14801 DPA10103-DPB15001 DPA10103-DPB15901 DPA10104-DPB10101 DPA10104-DPB11501 DPA10105-DPB10101 DPA10105-DPB10401 DPA10105-DPB15001 DPA10106-DPB10101 DPA10201-DPB10101 DPA10201-DPB110601 DPA10201-DPB11501 DPA10201-DPB11601 DPA10201-DPB11901 DPA10202-DPB10101 DPA10202-DPB10201 DPA10202-DPB10202 DPA10202-DPB10401 DPA10202-DPB110601 DPA10202-DPB11901 DPA10202-DPB13101 DPA10202-DPB16501 DPA10301-DPB10101 DPA10301-DPB10201 DPA10301-DPB10202 DPA10301-DPB10401 DPA10301-DPB10402 DPA10301-DPB110501 DPA10301-DPB110601 DPA10301-DPB11801 DPA10301-DPB12301 DPA10301-DPB13901 DPA10301-DPB14001 DPA10301-DPB14901 DPA10301-DPB15501 DPA10301-DPB16501 DPA10301-DPB17501 DPA10301-DPB18001 DPA10401-DPB10101 DPA10401-DPB10201; note = HLAs: DPA10401-DPB10202 DPA10401-DPB10402 DPA10401-DPB10501 DPA10401-DPB110501 DPA10401-DPB14901
PPFLWVGFELYPDK

SEQ ID NO: 6323 - protein, 14 aa, synthetic construct
  source 1..14: note = Seed: PPFLWMGYELHPDK; note = HLAs: DRB1_1001 DPA10103-DPB10101 DPA10103-DPB10201 DPA10103-DPB10202 DPA10103-DPB10401 DPA10103-DPB112601 DPA10103-DPB11501 DPA10103-DPB11601 DPA10103-DPB11901 DPA10103-DPB12301 DPA10103-DPB13101 DPA10103-DPB13401 DPA10103-DPB13901 DPA10103-DPB14001 DPA10103-DPB14101 DPA10103-DPB14801 DPA10103-DPB15001 DPA10103-DPB15901 DPA10104-DPB10101 DPA10104-DPB11501 DPA10105-DPB10101 DPA10105-DPB10401 DPA10105-DPB15001 DPA10106-DPB10101 DPA10201-DPB10101 DPA10201-DPB110601 DPA10201-DPB11501 DPA10201-DPB11601 DPA10201-DPB11901 DPA10202-DPB10101 DPA10202-DPB10201 DPA10202-DPB10202 DPA10202-DPB10401 DPA10202-DPB110601 DPA10202-DPB11901 DPA10202-DPB13101 DPA10202-DPB16501 DPA10301-DPB10101 DPA10301-DPB10201 DPA10301-DPB10202 DPA10301-DPB10401 DPA10301-DPB10402 DPA10301-DPB110501 DPA10301-DPB110601 DPA10301-DPB11801 DPA10301-DPB12301 DPA10301-DPB13901 DPA10301-DPB14001 DPA10301-DPB14901 DPA10301-DPB15501 DPA10301-DPB16501 DPA10301-DPB17501 DPA10301-DPB18001 DPA10401-DPB10101 DPA10401-DPB10201; note = HLAs: DPA10401-DPB10202 DPA10401-DPB10402 DPA10401-DPB10501 DPA10401-DPB110501 DPA10401-DPB14901
PPFLWVGFELTPDK

SEQ ID NO: 6324 - protein, 14 aa, synthetic construct
  source 1..14: note = Seed: PPFLWMGYELHPDK; note = HLAs: DRB1_1001 DPA10103-DPB10101 DPA10103-DPB10201 DPA10103-DPB10202 DPA10103-DPB10401 DPA10103-DPB112601 DPA10103-DPB11501 DPA10103-DPB11601 DPA10103-DPB11901 DPA10103-DPB12301 DPA10103-DPB13101 DPA10103-DPB13401 DPA10103-DPB13901 DPA10103-DPB14001 DPA10103-DPB14101 DPA10103-DPB14801 DPA10103-DPB15001 DPA10103-DPB15901 DPA10104-DPB10101 DPA10104-DPB11501 DPA10105-DPB10101 DPA10105-DPB10401 DPA10105-DPB15001 DPA10106-DPB10101 DPA10201-DPB10101 DPA10201-DPB110601 DPA10201-DPB11501 DPA10201-DPB11601 DPA10201-DPB11901 DPA10202-DPB10101 DPA10202-DPB10201 DPA10202-DPB10202 DPA10202-DPB10401 DPA10202-DPB110601 DPA10202-DPB11901 DPA10202-DPB13101 DPA10202-DPB16501 DPA10301-DPB10101 DPA10301-DPB10201 DPA10301-DPB10202 DPA10301-DPB10401 DPA10301-DPB10402 DPA10301-DPB110501 DPA10301-DPB110601 DPA10301-DPB11801 DPA10301-DPB12301 DPA10301-DPB13901 DPA10301-DPB14001 DPA10301-DPB14901 DPA10301-DPB15501 DPA10301-DPB16501 DPA10301-DPB17501 DPA10301-DPB18001 DPA10401-DPB10101 DPA10401-DPB10201; note = HLAs: DPA10401-DPB10202 DPA10401-DPB10402 DPA10401-DPB10501 DPA10401-DPB110501 DPA10401-DPB14901
PPFLWAGYELVPDK

SEQ ID NO: 6325 - protein, 20 aa, synthetic construct
  source 1..20: note = Seed: KEPPFLWMGYELHPDKWTVQ; note = HLAs: DRB1_0101 DPA10103-DPB10101 DPA10103-DPB10201 DPA10103-DPB10202 DPA10103-DPB10401 DPA10103-DPB10402 DPA10103-DPB10501 DPA10103-DPB110501 DPA10103-DPB112601 DPA10103-DPB11501 DPA10103-DPB11601 DPA10103-DPB11801 DPA10103-DPB11901 DPA10103-DPB12301 DPA10103-DPB13101 DPA10103-DPB13401 DPA10103-DPB13901 DPA10103-DPB14001 DPA10103-DPB14101 DPA10103-DPB14801 DPA10103-DPB14901 DPA10103-DPB15001 DPA10103-DPB15101 DPA10103-DPB15501 DPA10103-DPB15901 DPA10103-DPB18001 DPA10104-DPB10101 DPA10104-DPB11501 DPA10105-DPB10101 DPA10105-DPB10401 DPA10105-DPB11801 DPA10105-DPB15001 DPA10106-DPB10101 DPA10201-DPB10101 DPA10201-DPB10201 DPA10201-DPB10202 DPA10201-DPB10401 DPA10201-DPB10501 DPA10201-DPB110601 DPA10201-DPB11501 DPA10201-DPB11601 DPA10201-DPB11901 DPA10201-DPB13401 DPA10201-DPB15501 DPA10202-DPB10101 DPA10202-DPB10201 DPA10202-DPB10202 DPA10202-DPB10401 DPA10202-DPB10501 DPA10202-DPB110601 DPA10202-DPB11101 DPA10202-DPB11301 DPA10202-DPB11801 DPA10202-DPB11901 DPA10202-DPB13101; note = HLAs: DPA10202-DPB13801 DPA10202-DPB15501 DPA10202-DPB16501 DPA10301-DPB10101 DPA10301-DPB10201 DPA10301-DPB10202 DPA10301-DPB10401 DPA10301-DPB10402 DPA10301-DPB110501 DPA10301-DPB110601 DPA10301-DPB11101 DPA10301-DPB11301 DPA10301-DPB11801 DPA10301-DPB12301 DPA10301-DPB13901 DPA10301-DPB14001 DPA10301-DPB14901 DPA10301-DPB15501 DPA10301-DPB16501 DPA10301-DPB17501 DPA10301-DPB18001 DPA10401-DPB10101 DPA10401-DPB10201 DPA10401-DPB10202 DPA10401-DPB10402 DPA10401-DPB10501 DPA10401-DPB110501 DPA10401-DPB14901
KEPPILWTGFELVPDKWTVQ

SEQ ID NO: 6326 - protein, 14 aa, synthetic construct
  source 1..14: note = Seed: PPFLWMGYELHPDK; note = HLAs: DPA10103-DPB10101 DPA10103-DPB10201 DPA10103-DPB10202 DPA10103-DPB10401 DPA10103-DPB112601 DPA10103-DPB11501 DPA10103-DPB11601 DPA10103-DPB11901 DPA10103-DPB12301 DPA10103-DPB13101 DPA10103-DPB13401 DPA10103-DPB13901 DPA10103-DPB14001 DPA10103-DPB14101 DPA10103-DPB14801 DPA10103-DPB15001 DPA10103-DPB15901 DPA10104-DPB10101 DPA10104-DPB11501 DPA10105-DPB10101 DPA10105-DPB10401 DPA10105-DPB15001 DPA10106-DPB10101 DPA10201-DPB10101 DPA10201-DPB110601 DPA10201-DPB11501 DPA10201-DPB11601 DPA10201-DPB11901 DPA10202-DPB10101 DPA10202-DPB10201 DPA10202-DPB10202 DPA10202-DPB10401 DPA10202-DPB110601 DPA10202-DPB11901 DPA10202-DPB13101 DPA10202-DPB16501 DPA10301-DPB10101 DPA10301-DPB10201 DPA10301-DPB10202 DPA10301-DPB10401 DPA10301-DPB10402 DPA10301-DPB110501 DPA10301-DPB110601 DPA10301-DPB11801 DPA10301-DPB12301 DPA10301-DPB13901 DPA10301-DPB14001 DPA10301-DPB14901 DPA10301-DPB15501 DPA10301-DPB16501 DPA10301-DPB17501 DPA10301-DPB18001 DPA10401-DPB10101 DPA10401-DPB10201; note = HLAs: DPA10401-DPB10202 DPA10401-DPB10402 DPA10401-DPB10501 DPA10401-DPB110501 DPA10401-DPB14901
PPFLWFGFELLPDK

SEQ ID NO: 6327 - protein, 14 aa, synthetic construct
  source 1..14: note = Seed: PPFLWMGYELHPDK; note = HLAs: DRB1_1001 DPA10103-DPB10101 DPA10103-DPB10201 DPA10103-DPB10202 DPA10103-DPB10401 DPA10103-DPB112601 DPA10103-DPB11501 DPA10103-DPB11601 DPA10103-DPB11901 DPA10103-DPB12301 DPA10103-DPB13101 DPA10103-DPB13401 DPA10103-DPB13901 DPA10103-DPB14001 DPA10103-DPB14101 DPA10103-DPB14801 DPA10103-DPB15001 DPA10103-DPB15901 DPA10104-DPB10101 DPA10104-DPB11501 DPA10105-DPB10101 DPA10105-DPB10401 DPA10105-DPB15001 DPA10106-DPB10101 DPA10201-DPB10101 DPA10201-DPB110601 DPA10201-DPB11501 DPA10201-DPB11601 DPA10201-DPB11901 DPA10202-DPB10101 DPA10202-DPB10201 DPA10202-DPB10202 DPA10202-DPB10401 DPA10202-DPB110601 DPA10202-DPB11901 DPA10202-DPB13101 DPA10202-DPB16501 DPA10301-DPB10101 DPA10301-DPB10201 DPA10301-DPB10202 DPA10301-DPB10401 DPA10301-DPB10402 DPA10301-DPB110501 DPA10301-DPB110601 DPA10301-DPB11801 DPA10301-DPB12301 DPA10301-DPB13901 DPA10301-DPB14001 DPA10301-DPB14901 DPA10301-DPB15501 DPA10301-DPB16501 DPA10301-DPB17501 DPA10301-DPB18001 DPA10401-DPB10101 DPA10401-DPB10201; note = HLAs: DPA10401-DPB10202 DPA10401-DPB10402 DPA10401-DPB10501 DPA10401-DPB110501 DPA10401-DPB14901
PPYLWIGFELLPDK

SEQ ID NO: 6328 - protein, 20 aa, synthetic construct
  source 1..20: note = Seed: KEPPFLWMGYELHPDKWTVQ; note = HLAs: DPA10103-DPB10101 DPA10103-DPB10201 DPA10103-DPB10202 DPA10103-DPB10401 DPA10103-DPB10402 DPA10103-DPB10501 DPA10103-DPB110501 DPA10103-DPB112601 DPA10103-DPB11501 DPA10103-DPB11601 DPA10103-DPB11801 DPA10103-DPB11901 DPA10103-DPB12301 DPA10103-DPB13101 DPA10103-DPB13401 DPA10103-DPB13901 DPA10103-DPB14001 DPA10103-DPB14101 DPA10103-DPB14801 DPA10103-DPB14901 DPA10103-DPB15001 DPA10103-DPB15101 DPA10103-DPB15501 DPA10103-DPB15901 DPA10103-DPB18001 DPA10104-DPB10101 DPA10104-DPB11501 DPA10105-DPB10101 DPA10105-DPB10401 DPA10105-DPB11801 DPA10105-DPB15001 DPA10106-DPB10101 DPA10201-DPB10101 DPA10201-DPB10201 DPA10201-DPB10202 DPA10201-DPB10401 DPA10201-DPB10501 DPA10201-DPB110601 DPA10201-DPB11501 DPA10201-DPB11601 DPA10201-DPB11901 DPA10201-DPB13401 DPA10201-DPB15501 DPA10202-DPB10101 DPA10202-DPB10201 DPA10202-DPB10202 DPA10202-DPB10401 DPA10202-DPB10501 DPA10202-DPB110601 DPA10202-DPB11101 DPA10202-DPB11301 DPA10202-DPB11801 DPA10202-DPB11901 DPA10202-DPB13101 DPA10202-DPB13801; note = HLAs: DPA10202-DPB15501 DPA10202-DPB16501 DPA10301-DPB10101 DPA10301-DPB10201 DPA10301-DPB10202 DPA10301-DPB10401 DPA10301-DPB10402 DPA10301-DPB110501 DPA10301-DPB110601 DPA10301-DPB11101 DPA10301-DPB11301 DPA10301-DPB11801 DPA10301-DPB12301 DPA10301-DPB13901 DPA10301-DPB14001 DPA10301-DPB14901 DPA10301-DPB15501 DPA10301-DPB16501 DPA10301-DPB17501 DPA10301-DPB18001 DPA10401-DPB10101 DPA10401-DPB10201 DPA10401-DPB10202 DPA10401-DPB10402 DPA10401-DPB10501 DPA10401-DPB110501 DPA10401-DPB14901
KEPPYLWTGFELMPDKWTVQ

SEQ ID NO: 6329 - protein, 14 aa, synthetic construct
  source 1..14: note = Seed: PPFLWMGYELHPDK; note = HLAs: DRB1_1001 DPA10103-DPB10101 DPA10103-DPB10201 DPA10103-DPB10202 DPA10103-DPB10401 DPA10103-DPB112601 DPA10103-DPB11501 DPA10103-DPB11601 DPA10103-DPB11901 DPA10103-DPB12301 DPA10103-DPB13101 DPA10103-DPB13401 DPA10103-DPB13901 DPA10103-DPB14001 DPA10103-DPB14101 DPA10103-DPB14801 DPA10103-DPB15001 DPA10103-DPB15901 DPA10104-DPB10101 DPA10104-DPB11501 DPA10105-DPB10101 DPA10105-DPB10401 DPA10105-DPB15001 DPA10106-DPB10101 DPA10201-DPB10101 DPA10201-DPB110601 DPA10201-DPB11501 DPA10201-DPB11601 DPA10201-DPB11901 DPA10202-DPB10101 DPA10202-DPB10201 DPA10202-DPB10202 DPA10202-DPB10401 DPA10202-DPB110601 DPA10202-DPB11901 DPA10202-DPB13101 DPA10202-DPB16501 DPA10301-DPB10101 DPA10301-DPB10201 DPA10301-DPB10202 DPA10301-DPB10401 DPA10301-DPB10402 DPA10301-DPB110501 DPA10301-DPB110601 DPA10301-DPB11801 DPA10301-DPB12301 DPA10301-DPB13901 DPA10301-DPB14001 DPA10301-DPB14901 DPA10301-DPB15501 DPA10301-DPB16501 DPA10301-DPB17501 DPA10301-DPB18001 DPA10401-DPB10101 DPA10401-DPB10201; note = HLAs: DPA10401-DPB10202 DPA10401-DPB10402 DPA10401-DPB10501 DPA10401-DPB110501 DPA10401-DPB14901
PPFLWIGFELAPDK

SEQ ID NO: 6330 - protein, 14 aa, synthetic construct
  source 1..14: note = Seed: PPFLWMGYELHPDK; note = HLAs: DRB1_1001 DPA10103-DPB10101 DPA10103-DPB10201 DPA10103-DPB10202 DPA10103-DPB10401 DPA10103-DPB112601 DPA10103-DPB11501 DPA10103-DPB11601 DPA10103-DPB11901 DPA10103-DPB12301 DPA10103-DPB13101 DPA10103-DPB13401 DPA10103-DPB13901 DPA10103-DPB14001 DPA10103-DPB14101 DPA10103-DPB14801 DPA10103-DPB15001 DPA10103-DPB15901 DPA10104-DPB10101 DPA10104-DPB11501 DPA10105-DPB10101 DPA10105-DPB10401 DPA10105-DPB15001 DPA10106-DPB10101 DPA10201-DPB10101 DPA10201-DPB110601 DPA10201-DPB11501 DPA10201-DPB11601 DPA10201-DPB11901 DPA10202-DPB10101 DPA10202-DPB10201 DPA10202-DPB10202 DPA10202-DPB10401 DPA10202-DPB110601 DPA10202-DPB11901 DPA10202-DPB13101 DPA10202-DPB16501 DPA10301-DPB10101 DPA10301-DPB10201 DPA10301-DPB10202 DPA10301-DPB10401 DPA10301-DPB10402 DPA10301-DPB110501 DPA10301-DPB110601 DPA10301-DPB11801 DPA10301-DPB12301 DPA10301-DPB13901 DPA10301-DPB14001 DPA10301-DPB14901 DPA10301-DPB15501 DPA10301-DPB16501 DPA10301-DPB17501 DPA10301-DPB18001 DPA10401-DPB10101 DPA10401-DPB10201; note = HLAs: DPA10401-DPB10202 DPA10401-DPB10402 DPA10401-DPB10501 DPA10401-DPB110501 DPA10401-DPB14901
PPFLWIGFELTPDK

SEQ ID NO: 6331 - protein, 20 aa, synthetic construct
  source 1..20: note = Seed: KEPPFLWMGYELHPDKWTVQ; note = HLAs: DRB1_0101 DPA10103-DPB10101 DPA10103-DPB10201 DPA10103-DPB10202 DPA10103-DPB10401 DPA10103-DPB10402 DPA10103-DPB10501 DPA10103-DPB110501 DPA10103-DPB112601 DPA10103-DPB11501 DPA10103-DPB11601 DPA10103-DPB11801 DPA10103-DPB11901 DPA10103-DPB12301 DPA10103-DPB13101 DPA10103-DPB13401 DPA10103-DPB13901 DPA10103-DPB14001 DPA10103-DPB14101 DPA10103-DPB14801 DPA10103-DPB14901 DPA10103-DPB15001 DPA10103-DPB15101 DPA10103-DPB15501 DPA10103-DPB15901 DPA10103-DPB18001 DPA10104-DPB10101 DPA10104-DPB11501 DPA10105-DPB10101 DPA10105-DPB10401 DPA10105-DPB11801 DPA10105-DPB15001 DPA10106-DPB10101 DPA10201-DPB10101 DPA10201-DPB10201 DPA10201-DPB10202 DPA10201-DPB10401 DPA10201-DPB10501 DPA10201-DPB110601 DPA10201-DPB11501 DPA10201-DPB11601 DPA10201-DPB11901 DPA10201-DPB13401 DPA10201-DPB15501 DPA10202-DPB10101 DPA10202-DPB10201 DPA10202-DPB10202 DPA10202-DPB10401 DPA10202-DPB10501 DPA10202-DPB110601 DPA10202-DPB11101 DPA10202-DPB11301 DPA10202-DPB11801 DPA10202-DPB11901 DPA10202-DPB13101; note = HLAs: DPA10202-DPB13801 DPA10202-DPB15501 DPA10202-DPB16501 DPA10301-DPB10101 DPA10301-DPB10201 DPA10301-DPB10202 DPA10301-DPB10401 DPA10301-DPB10402 DPA10301-DPB110501 DPA10301-DPB110601 DPA10301-DPB11101 DPA10301-DPB11301 DPA10301-DPB11801 DPA10301-DPB12301 DPA10301-DPB13901 DPA10301-DPB14001 DPA10301-DPB14901 DPA10301-DPB15501 DPA10301-DPB16501 DPA10301-DPB17501 DPA10301-DPB18001 DPA10401-DPB10101 DPA10401-DPB10201 DPA10401-DPB10202 DPA10401-DPB10402 DPA10401-DPB10501 DPA10401-DPB110501 DPA10401-DPB14901
KEPPFLWSGWELLPDKWTVQ

SEQ ID NO: 6332 - protein, 14 aa, synthetic construct
  source 1..14: note = Seed: PPFLWMGYELHPDK; note = HLAs: DPA10103-DPB10101 DPA10103-DPB10201 DPA10103-DPB10202 DPA10103-DPB10401 DPA10103-DPB112601 DPA10103-DPB11501 DPA10103-DPB11601 DPA10103-DPB11901 DPA10103-DPB12301 DPA10103-DPB13101 DPA10103-DPB13401 DPA10103-DPB13901 DPA10103-DPB14001 DPA10103-DPB14101 DPA10103-DPB14801 DPA10103-DPB15001 DPA10103-DPB15901 DPA10104-DPB10101 DPA10104-DPB11501 DPA10105-DPB10101 DPA10105-DPB10401 DPA10105-DPB15001 DPA10106-DPB10101 DPA10201-DPB10101 DPA10201-DPB110601 DPA10201-DPB11501 DPA10201-DPB11601 DPA10201-DPB11901 DPA10202-DPB10101 DPA10202-DPB10201 DPA10202-DPB10202 DPA10202-DPB10401 DPA10202-DPB110601 DPA10202-DPB11901 DPA10202-DPB13101 DPA10202-DPB16501 DPA10301-DPB10101 DPA10301-DPB10201 DPA10301-DPB10202 DPA10301-DPB10401 DPA10301-DPB10402 DPA10301-DPB110501 DPA10301-DPB110601 DPA10301-DPB11801 DPA10301-DPB12301 DPA10301-DPB13901 DPA10301-DPB14001 DPA10301-DPB14901 DPA10301-DPB15501 DPA10301-DPB16501 DPA10301-DPB17501 DPA10301-DPB18001 DPA10401-DPB10101 DPA10401-DPB10201; note = HLAs: DPA10401-DPB10202 DPA10401-DPB10402 DPA10401-DPB10501 DPA10401-DPB110501 DPA10401-DPB14901
PPFLWHGFELAPDK

SEQ ID NO: 6333 - protein, 14 aa, synthetic construct
  source 1..14: note = Seed: PPFLWMGYELHPDK; note = HLAs: DRB1_1001 DPA10103-DPB10101 DPA10103-DPB10201 DPA10103-DPB10202 DPA10103-DPB10401 DPA10103-DPB112601 DPA10103-DPB11501 DPA10103-DPB11601 DPA10103-DPB11901 DPA10103-DPB12301 DPA10103-DPB13101 DPA10103-DPB13401 DPA10103-DPB13901 DPA10103-DPB14001 DPA10103-DPB14101 DPA10103-DPB14801 DPA10103-DPB15001 DPA10103-DPB15901 DPA10104-DPB10101 DPA10104-DPB11501 DPA10105-DPB10101 DPA10105-DPB10401 DPA10105-DPB15001 DPA10106-DPB10101 DPA10201-DPB10101 DPA10201-DPB110601 DPA10201-DPB11501 DPA10201-DPB11601 DPA10201-DPB11901 DPA10202-DPB10101 DPA10202-DPB10201 DPA10202-DPB10202 DPA10202-DPB10401 DPA10202-DPB110601 DPA10202-DPB11901 DPA10202-DPB13101 DPA10202-DPB16501 DPA10301-DPB10101 DPA10301-DPB10201 DPA10301-DPB10202 DPA10301-DPB10401 DPA10301-DPB10402 DPA10301-DPB110501 DPA10301-DPB110601 DPA10301-DPB11801 DPA10301-DPB12301 DPA10301-DPB13901 DPA10301-DPB14001 DPA10301-DPB14901 DPA10301-DPB15501 DPA10301-DPB16501 DPA10301-DPB17501 DPA10301-DPB18001 DPA10401-DPB10101 DPA10401-DPB10201; note = HLAs: DPA10401-DPB10202 DPA10401-DPB10402 DPA10401-DPB10501 DPA10401-DPB110501 DPA10401-DPB14901
PPYLWTGFELMPDK

SEQ ID NO: 6334 - protein, 20 aa, synthetic construct
  source 1..20: note = Seed: KEPPFLWMGYELHPDKWTVQ; note = HLAs: DRB1_0101 DRB1_1001 DPA10103-DPB10101 DPA10103-DPB10201 DPA10103-DPB10202 DPA10103-DPB10401 DPA10103-DPB10402 DPA10103-DPB10501 DPA10103-DPB110501 DPA10103-DPB112601 DPA10103-DPB11501 DPA10103-DPB11601 DPA10103-DPB11801 DPA10103-DPB11901 DPA10103-DPB12301 DPA10103-DPB13101 DPA10103-DPB13401 DPA10103-DPB13901 DPA10103-DPB14001 DPA10103-DPB14101 DPA10103-DPB14801 DPA10103-DPB14901 DPA10103-DPB15001 DPA10103-DPB15101 DPA10103-DPB15501 DPA10103-DPB15901 DPA10103-DPB18001 DPA10104-DPB10101 DPA10104-DPB11501 DPA10105-DPB10101 DPA10105-DPB10401 DPA10105-DPB11801 DPA10105-DPB15001 DPA10106-DPB10101 DPA10201-DPB10101 DPA10201-DPB10201 DPA10201-DPB10202 DPA10201-DPB10401 DPA10201-DPB10501 DPA10201-DPB110601 DPA10201-DPB11501 DPA10201-DPB11601 DPA10201-DPB11901 DPA10201-DPB13401 DPA10201-DPB15501 DPA10202-DPB10101 DPA10202-DPB10201 DPA10202-DPB10202 DPA10202-DPB10401 DPA10202-DPB10501 DPA10202-DPB110601 DPA10202-DPB11101 DPA10202-DPB11301 DPA10202-DPB11801 DPA10202-DPB11901; note = HLAs: DPA10202-DPB13101 DPA10202-DPB13801 DPA10202-DPB15501 DPA10202-DPB16501 DPA10301-DPB10101 DPA10301-DPB10201 DPA10301-DPB10202 DPA10301-DPB10401 DPA10301-DPB10402 DPA10301-DPB110501 DPA10301-DPB110601 DPA10301-DPB11101 DPA10301-DPB11301 DPA10301-DPB11801 DPA10301-DPB12301 DPA10301-DPB13901 DPA10301-DPB14001 DPA10301-DPB14901 DPA10301-DPB15501 DPA10301-DPB16501 DPA10301-DPB17501 DPA10301-DPB18001 DPA10401-DPB10101 DPA10401-DPB10201 DPA10401-DPB10202 DPA10401-DPB10402 DPA10401-DPB10501 DPA10401-DPB110501 DPA10401-DPB14901
KEPPYLWAGFELIPDKWTVQ

SEQ ID NO: 6335 - protein, 20 aa, synthetic construct
  source 1..20: note = Seed: KEPPFLWMGYELHPDKWTVQ; note = HLAs: DRB1_0101 DPA10103-DPB10101 DPA10103-DPB10201 DPA10103-DPB10202 DPA10103-DPB10401 DPA10103-DPB10402 DPA10103-DPB10501 DPA10103-DPB110501 DPA10103-DPB112601 DPA10103-DPB11501 DPA10103-DPB11601 DPA10103-DPB11801 DPA10103-DPB11901 DPA10103-DPB12301 DPA10103-DPB13101 DPA10103-DPB13401 DPA10103-DPB13901 DPA10103-DPB14001 DPA10103-DPB14101 DPA10103-DPB14801 DPA10103-DPB14901 DPA10103-DPB15001 DPA10103-DPB15101 DPA10103-DPB15501 DPA10103-DPB15901 DPA10103-DPB18001 DPA10104-DPB10101 DPA10104-DPB11501 DPA10105-DPB10101 DPA10105-DPB10401 DPA10105-DPB11801 DPA10105-DPB15001 DPA10106-DPB10101 DPA10201-DPB10101 DPA10201-DPB10201 DPA10201-DPB10202 DPA10201-DPB10401 DPA10201-DPB10501 DPA10201-DPB110601 DPA10201-DPB11501 DPA10201-DPB11601 DPA10201-DPB11901 DPA10201-DPB13401 DPA10201-DPB15501 DPA10202-DPB10101 DPA10202-DPB10201 DPA10202-DPB10202 DPA10202-DPB10401 DPA10202-DPB10501 DPA10202-DPB110601 DPA10202-DPB11101 DPA10202-DPB11301 DPA10202-DPB11801 DPA10202-DPB11901 DPA10202-DPB13101; note = HLAs: DPA10202-DPB13801 DPA10202-DPB15501 DPA10202-DPB16501 DPA10301-DPB10101 DPA10301-DPB10201 DPA10301-DPB10202 DPA10301-DPB10401 DPA10301-DPB10402 DPA10301-DPB110501 DPA10301-DPB110601 DPA10301-DPB11101 DPA10301-DPB11301 DPA10301-DPB11801 DPA10301-DPB12301 DPA10301-DPB13901 DPA10301-DPB14001 DPA10301-DPB14901 DPA10301-DPB15501 DPA10301-DPB16501 DPA10301-DPB17501 DPA10301-DPB18001 DPA10401-DPB10101 DPA10401-DPB10201 DPA10401-DPB10202 DPA10401-DPB10402 DPA10401-DPB10501 DPA10401-DPB110501 DPA10401-DPB14901
KEPPFLWSGWELVPDKWTVQ

SEQ ID NO: 6336 - protein, 20 aa, synthetic construct
  source 1..20: note = Seed: KEPPFLWMGYELHPDKWTVQ; note = HLAs: DPA10103-DPB10101 DPA10103-DPB10201 DPA10103-DPB10202 DPA10103-DPB10401 DPA10103-DPB10402 DPA10103-DPB10501 DPA10103-DPB110501 DPA10103-DPB112601 DPA10103-DPB11501 DPA10103-DPB11601 DPA10103-DPB11801 DPA10103-DPB11901 DPA10103-DPB12301 DPA10103-DPB13101 DPA10103-DPB13401 DPA10103-DPB13901 DPA10103-DPB14001 DPA10103-DPB14101 DPA10103-DPB14801 DPA10103-DPB14901 DPA10103-DPB15001 DPA10103-DPB15101 DPA10103-DPB15501 DPA10103-DPB15901 DPA10103-DPB18001 DPA10104-DPB10101 DPA10104-DPB11501 DPA10105-DPB10101 DPA10105-DPB10401 DPA10105-DPB11801 DPA10105-DPB15001 DPA10106-DPB10101 DPA10201-DPB10101 DPA10201-DPB10201 DPA10201-DPB10202 DPA10201-DPB10401 DPA10201-DPB10501 DPA10201-DPB110601 DPA10201-DPB11501 DPA10201-DPB11601 DPA10201-DPB11901 DPA10201-DPB13401 DPA10201-DPB15501 DPA10202-DPB10101 DPA10202-DPB10201 DPA10202-DPB10202 DPA10202-DPB10401 DPA10202-DPB10501 DPA10202-DPB110601 DPA10202-DPB11101 DPA10202-DPB11301 DPA10202-DPB11801 DPA10202-DPB11901 DPA10202-DPB13101 DPA10202-DPB13801; note = HLAs: DPA10202-DPB15501 DPA10202-DPB16501 DPA10301-DPB10101 DPA10301-DPB10201 DPA10301-DPB10202 DPA10301-DPB10401 DPA10301-DPB10402 DPA10301-DPB110501 DPA10301-DPB110601 DPA10301-DPB11101 DPA10301-DPB11301 DPA10301-DPB11801 DPA10301-DPB12301 DPA10301-DPB13901 DPA10301-DPB14001 DPA10301-DPB14901 DPA10301-DPB15501 DPA10301-DPB16501 DPA10301-DPB17501 DPA10301-DPB18001 DPA10401-DPB10101 DPA10401-DPB10201 DPA10401-DPB10202 DPA10401-DPB10402 DPA10401-DPB10501 DPA10401-DPB110501 DPA10401-DPB14901
KEPPFLWNGFELMPDKWTVQ

SEQ ID NO: 6337 - protein, 14 aa, synthetic construct
  source 1..14: note = Seed: PPFLWMGYELHPDK; note = HLAs: DPA10103-DPB10101 DPA10103-DPB10201 DPA10103-DPB10202 DPA10103-DPB10401 DPA10103-DPB112601 DPA10103-DPB11501 DPA10103-DPB11601 DPA10103-DPB11901 DPA10103-DPB12301 DPA10103-DPB13101 DPA10103-DPB13401 DPA10103-DPB13901 DPA10103-DPB14001 DPA10103-DPB14101 DPA10103-DPB14801 DPA10103-DPB15001 DPA10103-DPB15901 DPA10104-DPB10101 DPA10104-DPB11501 DPA10105-DPB10101 DPA10105-DPB10401 DPA10105-DPB15001 DPA10106-DPB10101 DPA10201-DPB10101 DPA10201-DPB110601 DPA10201-DPB11501 DPA10201-DPB11601 DPA10201-DPB11901 DPA10202-DPB10101 DPA10202-DPB10201 DPA10202-DPB10202 DPA10202-DPB10401 DPA10202-DPB110601 DPA10202-DPB11901 DPA10202-DPB13101 DPA10202-DPB16501 DPA10301-DPB10101 DPA10301-DPB10201 DPA10301-DPB10202 DPA10301-DPB10401 DPA10301-DPB10402 DPA10301-DPB110501 DPA10301-DPB110601 DPA10301-DPB11801 DPA10301-DPB12301 DPA10301-DPB13901 DPA10301-DPB14001 DPA10301-DPB14901 DPA10301-DPB15501 DPA10301-DPB16501 DPA10301-DPB17501 DPA10301-DPB18001 DPA10401-DPB10101 DPA10401-DPB10201; note = HLAs: DPA10401-DPB10202 DPA10401-DPB10402 DPA10401-DPB10501 DPA10401-DPB110501 DPA10401-DPB14901
PPFLWSGWELVPDK

SEQ ID NO: 6338 - protein, 20 aa, synthetic construct
  source 1..20: note = Seed: KEPPFLWMGYELHPDKWTVQ; note = HLAs: DRB1_0101 DPA10103-DPB10101 DPA10103-DPB10201 DPA10103-DPB10202 DPA10103-DPB10401 DPA10103-DPB10402 DPA10103-DPB10501 DPA10103-DPB110501 DPA10103-DPB112601 DPA10103-DPB11501 DPA10103-DPB11601 DPA10103-DPB11801 DPA10103-DPB11901 DPA10103-DPB12301 DPA10103-DPB13101 DPA10103-DPB13401 DPA10103-DPB13901 DPA10103-DPB14001 DPA10103-DPB14101 DPA10103-DPB14801 DPA10103-DPB14901 DPA10103-DPB15001 DPA10103-DPB15101 DPA10103-DPB15501 DPA10103-DPB15901 DPA10103-DPB18001 DPA10104-DPB10101 DPA10104-DPB11501 DPA10105-DPB10101 DPA10105-DPB10401 DPA10105-DPB11801 DPA10105-DPB15001 DPA10106-DPB10101 DPA10201-DPB10101 DPA10201-DPB10201 DPA10201-DPB10202 DPA10201-DPB10401 DPA10201-DPB10501 DPA10201-DPB110601 DPA10201-DPB11501 DPA10201-DPB11601 DPA10201-DPB11901 DPA10201-DPB13401 DPA10201-DPB15501 DPA10202-DPB10101 DPA10202-DPB10201 DPA10202-DPB10202 DPA10202-DPB10401 DPA10202-DPB10501 DPA10202-DPB110601 DPA10202-DPB11101 DPA10202-DPB11301 DPA10202-DPB11801 DPA10202-DPB11901 DPA10202-DPB13101; note = HLAs: DPA10202-DPB13801 DPA10202-DPB15501 DPA10202-DPB16501 DPA10301-DPB10101 DPA10301-DPB10201 DPA10301-DPB10202 DPA10301-DPB10401 DPA10301-DPB10402 DPA10301-DPB110501 DPA10301-DPB110601 DPA10301-DPB11101 DPA10301-DPB11301 DPA10301-DPB11801 DPA10301-DPB12301 DPA10301-DPB13901 DPA10301-DPB14001 DPA10301-DPB14901 DPA10301-DPB15501 DPA10301-DPB16501 DPA10301-DPB17501 DPA10301-DPB18001 DPA10401-DPB10101 DPA10401-DPB10201 DPA10401-DPB10202 DPA10401-DPB10402 DPA10401-DPB10501 DPA10401-DPB110501 DPA10401-DPB14901
KEPPWLWSGFELIPDKWTVQ

SEQ ID NO: 6339 - protein, 20 aa, synthetic construct
  source 1..20: note = Seed: KEPPFLWMGYELHPDKWTVQ; note = HLAs: DPA10103-DPB10101 DPA10103-DPB10201 DPA10103-DPB10202 DPA10103-DPB10401 DPA10103-DPB10402 DPA10103-DPB10501 DPA10103-DPB110501 DPA10103-DPB112601 DPA10103-DPB11501 DPA10103-DPB11601 DPA10103-DPB11801 DPA10103-DPB11901 DPA10103-DPB12301 DPA10103-DPB13101 DPA10103-DPB13401 DPA10103-DPB13901 DPA10103-DPB14001 DPA10103-DPB14101 DPA10103-DPB14801 DPA10103-DPB14901 DPA10103-DPB15001 DPA10103-DPB15101 DPA10103-DPB15501 DPA10103-DPB15901 DPA10103-DPB18001 DPA10104-DPB10101 DPA10104-DPB11501 DPA10105-DPB10101 DPA10105-DPB10401 DPA10105-DPB11801 DPA10105-DPB15001 DPA10106-DPB10101 DPA10201-DPB10101 DPA10201-DPB10201 DPA10201-DPB10202 DPA10201-DPB10401 DPA10201-DPB10501 DPA10201-DPB110601 DPA10201-DPB11501 DPA10201-DPB11601 DPA10201-DPB11901 DPA10201-DPB13401 DPA10201-DPB15501 DPA10202-DPB10101 DPA10202-DPB10201 DPA10202-DPB10202 DPA10202-DPB10401 DPA10202-DPB10501 DPA10202-DPB110601 DPA10202-DPB11101 DPA10202-DPB11301 DPA10202-DPB11801 DPA10202-DPB11901 DPA10202-DPB13101 DPA10202-DPB13801; note = HLAs: DPA10202-DPB15501 DPA10202-DPB16501 DPA10301-DPB10101 DPA10301-DPB10201 DPA10301-DPB10202 DPA10301-DPB10401 DPA10301-DPB10402 DPA10301-DPB110501 DPA10301-DPB110601 DPA10301-DPB11101 DPA10301-DPB11301 DPA10301-DPB11801 DPA10301-DPB12301 DPA10301-DPB13901 DPA10301-DPB14001 DPA10301-DPB14901 DPA10301-DPB15501 DPA10301-DPB16501 DPA10301-DPB17501 DPA10301-DPB18001 DPA10401-DPB10101 DPA10401-DPB10201 DPA10401-DPB10202 DPA10401-DPB10402 DPA10401-DPB10501 DPA10401-DPB110501 DPA10401-DPB14901
KEPPFLWKGFELIPDKWTVQ

SEQ ID NO: 6340 - protein, 20 aa, synthetic construct
  source 1..20: note = Seed: KEPPFLWMGYELHPDKWTVQ; note = HLAs: DRB1_0101 DRB1_1001 DPA10103-DPB10101 DPA10103-DPB10201 DPA10103-DPB10202 DPA10103-DPB10401 DPA10103-DPB10402 DPA10103-DPB10501 DPA10103-DPB110501 DPA10103-DPB112601 DPA10103-DPB11501 DPA10103-DPB11601 DPA10103-DPB11801 DPA10103-DPB11901 DPA10103-DPB12301 DPA10103-DPB13101 DPA10103-DPB13401 DPA10103-DPB13901 DPA10103-DPB14001 DPA10103-DPB14101 DPA10103-DPB14801 DPA10103-DPB14901 DPA10103-DPB15001 DPA10103-DPB15101 DPA10103-DPB15501 DPA10103-DPB15901 DPA10103-DPB18001 DPA10104-DPB10101 DPA10104-DPB11501 DPA10105-DPB10101 DPA10105-DPB10401 DPA10105-DPB11801 DPA10105-DPB15001 DPA10106-DPB10101 DPA10201-DPB10101 DPA10201-DPB10201 DPA10201-DPB10202 DPA10201-DPB10401 DPA10201-DPB10501 DPA10201-DPB110601 DPA10201-DPB11501 DPA10201-DPB11601 DPA10201-DPB11901 DPA10201-DPB13401 DPA10201-DPB15501 DPA10202-DPB10101 DPA10202-DPB10201 DPA10202-DPB10202 DPA10202-DPB10401 DPA10202-DPB10501 DPA10202-DPB110601 DPA10202-DPB11101 DPA10202-DPB11301 DPA10202-DPB11801 DPA10202-DPB11901; note = HLAs: DPA10202-DPB13101 DPA10202-DPB13801 DPA10202-DPB15501 DPA10202-DPB16501 DPA10301-DPB10101 DPA10301-DPB10201 DPA10301-DPB10202 DPA10301-DPB10401 DPA10301-DPB10402 DPA10301-DPB110501 DPA10301-DPB110601 DPA10301-DPB11101 DPA10301-DPB11301 DPA10301-DPB11801 DPA10301-DPB12301 DPA10301-DPB13901 DPA10301-DPB14001 DPA10301-DPB14901 DPA10301-DPB15501 DPA10301-DPB16501 DPA10301-DPB17501 DPA10301-DPB18001 DPA10401-DPB10101 DPA10401-DPB10201 DPA10401-DPB10202 DPA10401-DPB10402 DPA10401-DPB10501 DPA10401-DPB110501 DPA10401-DPB14901
KEPPFLWAGFELNPDKWTVQ

SEQ ID NO: 6341 - protein, 14 aa, synthetic construct
  source 1..14: note = Seed: PPFLWMGYELHPDK; note = HLAs: DPA10103-DPB10101 DPA10103-DPB10201 DPA10103-DPB10202 DPA10103-DPB10401 DPA10103-DPB112601 DPA10103-DPB11501 DPA10103-DPB11601 DPA10103-DPB11901 DPA10103-DPB12301 DPA10103-DPB13101 DPA10103-DPB13401 DPA10103-DPB13901 DPA10103-DPB14001 DPA10103-DPB14101 DPA10103-DPB14801 DPA10103-DPB15001 DPA10103-DPB15901 DPA10104-DPB10101 DPA10104-DPB11501 DPA10105-DPB10101 DPA10105-DPB10401 DPA10105-DPB15001 DPA10106-DPB10101 DPA10201-DPB10101 DPA10201-DPB110601 DPA10201-DPB11501 DPA10201-DPB11601 DPA10201-DPB11901 DPA10202-DPB10101 DPA10202-DPB10201 DPA10202-DPB10202 DPA10202-DPB10401 DPA10202-DPB110601 DPA10202-DPB11901 DPA10202-DPB13101 DPA10202-DPB16501 DPA10301-DPB10101 DPA10301-DPB10201 DPA10301-DPB10202 DPA10301-DPB10401 DPA10301-DPB10402 DPA10301-DPB110501 DPA10301-DPB110601 DPA10301-DPB11801 DPA10301-DPB12301 DPA10301-DPB13901 DPA10301-DPB14001 DPA10301-DPB14901 DPA10301-DPB15501 DPA10301-DPB16501 DPA10301-DPB17501 DPA10301-DPB18001 DPA10401-DPB10101 DPA10401-DPB10201; note = HLAs: DPA10401-DPB10202 DPA10401-DPB10402 DPA10401-DPB10501 DPA10401-DPB110501 DPA10401-DPB14901
PPYLWEGFELLPDK

SEQ ID NO: 6342 - protein, 20 aa, synthetic construct
  source 1..20: note = Seed: KEPPFLWMGYELHPDKWTVQ; note = HLAs: DRB1_0101 DPA10103-DPB10101 DPA10103-DPB10201 DPA10103-DPB10202 DPA10103-DPB10401 DPA10103-DPB10402 DPA10103-DPB10501 DPA10103-DPB110501 DPA10103-DPB112601 DPA10103-DPB11501 DPA10103-DPB11601 DPA10103-DPB11801 DPA10103-DPB11901 DPA10103-DPB12301 DPA10103-DPB13101 DPA10103-DPB13401 DPA10103-DPB13901 DPA10103-DPB14001 DPA10103-DPB14101 DPA10103-DPB14801 DPA10103-DPB14901 DPA10103-DPB15001 DPA10103-DPB15101 DPA10103-DPB15501 DPA10103-DPB15901 DPA10103-DPB18001 DPA10104-DPB10101 DPA10104-DPB11501 DPA10105-DPB10101 DPA10105-DPB10401 DPA10105-DPB11801 DPA10105-DPB15001 DPA10106-DPB10101 DPA10201-DPB10101 DPA10201-DPB10201 DPA10201-DPB10202 DPA10201-DPB10401 DPA10201-DPB10501 DPA10201-DPB110601 DPA10201-DPB11501 DPA10201-DPB11601 DPA10201-DPB11901 DPA10201-DPB13401 DPA10201-DPB15501 DPA10202-DPB10101 DPA10202-DPB10201 DPA10202-DPB10202 DPA10202-DPB10401 DPA10202-DPB10501 DPA10202-DPB110601 DPA10202-DPB11101 DPA10202-DPB11301 DPA10202-DPB11801 DPA10202-DPB11901 DPA10202-DPB13101; note = HLAs: DPA10202-DPB13801 DPA10202-DPB15501 DPA10202-DPB16501 DPA10301-DPB10101 DPA10301-DPB10201 DPA10301-DPB10202 DPA10301-DPB10401 DPA10301-DPB10402 DPA10301-DPB110501 DPA10301-DPB110601 DPA10301-DPB11101 DPA10301-DPB11301 DPA10301-DPB11801 DPA10301-DPB12301 DPA10301-DPB13901 DPA10301-DPB14001 DPA10301-DPB14901 DPA10301-DPB15501 DPA10301-DPB16501 DPA10301-DPB17501 DPA10301-DPB18001 DPA10401-DPB10101 DPA10401-DPB10201 DPA10401-DPB10202 DPA10401-DPB10402 DPA10401-DPB10501 DPA10401-DPB110501 DPA10401-DPB14901
KEPPFLWSGWELIPDKWTVQ

SEQ ID NO: 6343 - protein, 20 aa, synthetic construct
  source 1..20: note = Seed: KEPPFLWMGYELHPDKWTVQ; note = HLAs: DRB1_0101 DRB1_1001 DPA10103-DPB10101 DPA10103-DPB10201 DPA10103-DPB10202 DPA10103-DPB10401 DPA10103-DPB10402 DPA10103-DPB10501 DPA10103-DPB110501 DPA10103-DPB112601 DPA10103-DPB11501 DPA10103-DPB11601 DPA10103-DPB11801 DPA10103-DPB11901 DPA10103-DPB12301 DPA10103-DPB13101 DPA10103-DPB13401 DPA10103-DPB13901 DPA10103-DPB14001 DPA10103-DPB14101 DPA10103-DPB14801 DPA10103-DPB14901 DPA10103-DPB15001 DPA10103-DPB15101 DPA10103-DPB15501 DPA10103-DPB15901 DPA10103-DPB18001 DPA10104-DPB10101 DPA10104-DPB11501 DPA10105-DPB10101 DPA10105-DPB10401 DPA10105-DPB11801 DPA10105-DPB15001 DPA10106-DPB10101 DPA10201-DPB10101 DPA10201-DPB10201 DPA10201-DPB10202 DPA10201-DPB10401 DPA10201-DPB10501 DPA10201-DPB110601 DPA10201-DPB11501 DPA10201-DPB11601 DPA10201-DPB11901 DPA10201-DPB13401 DPA10201-DPB15501 DPA10202-DPB10101 DPA10202-DPB10201 DPA10202-DPB10202 DPA10202-DPB10401 DPA10202-DPB10501 DPA10202-DPB110601 DPA10202-DPB11101 DPA10202-DPB11301 DPA10202-DPB11801 DPA10202-DPB11901; note = HLAs: DPA10202-DPB13101 DPA10202-DPB13801 DPA10202-DPB15501 DPA10202-DPB16501 DPA10301-DPB10101 DPA10301-DPB10201 DPA10301-DPB10202 DPA10301-DPB10401 DPA10301-DPB10402 DPA10301-DPB110501 DPA10301-DPB110601 DPA10301-DPB11101 DPA10301-DPB11301 DPA10301-DPB11801 DPA10301-DPB12301 DPA10301-DPB13901 DPA10301-DPB14001 DPA10301-DPB14901 DPA10301-DPB15501 DPA10301-DPB16501 DPA10301-DPB17501 DPA10301-DPB18001 DPA10401-DPB10101 DPA10401-DPB10201 DPA10401-DPB10202 DPA10401-DPB10402 DPA10401-DPB10501 DPA10401-DPB110501 DPA10401-DPB14901
KEPPWLWTGFELVPDKWTVQ

SEQ ID NO: 6344 - protein, 20 aa, synthetic construct
  source 1..20: note = Seed: KEPPFLWMGYELHPDKWTVQ; note = HLAs: DRB1_0101 DPA10103-DPB10101 DPA10103-DPB10201 DPA10103-DPB10202 DPA10103-DPB10401 DPA10103-DPB10402 DPA10103-DPB10501 DPA10103-DPB110501 DPA10103-DPB112601 DPA10103-DPB11501 DPA10103-DPB11601 DPA10103-DPB11801 DPA10103-DPB11901 DPA10103-DPB12301 DPA10103-DPB13101 DPA10103-DPB13401 DPA10103-DPB13901 DPA10103-DPB14001 DPA10103-DPB14101 DPA10103-DPB14801 DPA10103-DPB14901 DPA10103-DPB15001 DPA10103-DPB15101 DPA10103-DPB15501 DPA10103-DPB15901 DPA10103-DPB18001 DPA10104-DPB10101 DPA10104-DPB11501 DPA10105-DPB10101 DPA10105-DPB10401 DPA10105-DPB11801 DPA10105-DPB15001 DPA10106-DPB10101 DPA10201-DPB10101 DPA10201-DPB10201 DPA10201-DPB10202 DPA10201-DPB10401 DPA10201-DPB10501 DPA10201-DPB110601 DPA10201-DPB11501 DPA10201-DPB11601 DPA10201-DPB11901 DPA10201-DPB13401 DPA10201-DPB15501 DPA10202-DPB10101 DPA10202-DPB10201 DPA10202-DPB10202 DPA10202-DPB10401 DPA10202-DPB10501 DPA10202-DPB110601 DPA10202-DPB11101 DPA10202-DPB11301 DPA10202-DPB11801 DPA10202-DPB11901 DPA10202-DPB13101; note = HLAs: DPA10202-DPB13801 DPA10202-DPB15501 DPA10202-DPB16501 DPA10301-DPB10101 DPA10301-DPB10201 DPA10301-DPB10202 DPA10301-DPB10401 DPA10301-DPB10402 DPA10301-DPB110501 DPA10301-DPB110601 DPA10301-DPB11101 DPA10301-DPB11301 DPA10301-DPB11801 DPA10301-DPB12301 DPA10301-DPB13901 DPA10301-DPB14001 DPA10301-DPB14901 DPA10301-DPB15501 DPA10301-DPB16501 DPA10301-DPB17501 DPA10301-DPB18001 DPA10401-DPB10101 DPA10401-DPB10201 DPA10401-DPB10202 DPA10401-DPB10402 DPA10401-DPB10501 DPA10401-DPB110501 DPA10401-DPB14901
KEPPFLWVGFELIPDKWTVQ

SEQ ID NO: 6345 - protein, 14 aa, synthetic construct
  source 1..14: note = Seed: PPFLWMGYELHPDK; note = HLAs: DPA10103-DPB10101 DPA10103-DPB10201 DPA10103-DPB10202 DPA10103-DPB10401 DPA10103-DPB112601 DPA10103-DPB11501 DPA10103-DPB11601 DPA10103-DPB11901 DPA10103-DPB12301 DPA10103-DPB13101 DPA10103-DPB13401 DPA10103-DPB13901 DPA10103-DPB14001 DPA10103-DPB14101 DPA10103-DPB14801 DPA10103-DPB15001 DPA10103-DPB15901 DPA10104-DPB10101 DPA10104-DPB11501 DPA10105-DPB10101 DPA10105-DPB10401 DPA10105-DPB15001 DPA10106-DPB10101 DPA10201-DPB10101 DPA10201-DPB110601 DPA10201-DPB11501 DPA10201-DPB11601 DPA10201-DPB11901 DPA10202-DPB10101 DPA10202-DPB10201 DPA10202-DPB10202 DPA10202-DPB10401 DPA10202-DPB110601 DPA10202-DPB11901 DPA10202-DPB13101 DPA10202-DPB16501 DPA10301-DPB10101 DPA10301-DPB10201 DPA10301-DPB10202 DPA10301-DPB10401 DPA10301-DPB10402 DPA10301-DPB110501 DPA10301-DPB110601 DPA10301-DPB11801 DPA10301-DPB12301 DPA10301-DPB13901 DPA10301-DPB14001 DPA10301-DPB14901 DPA10301-DPB15501 DPA10301-DPB16501 DPA10301-DPB17501 DPA10301-DPB18001 DPA10401-DPB10101 DPA10401-DPB10201; note = HLAs: DPA10401-DPB10202 DPA10401-DPB10402 DPA10401-DPB10501 DPA10401-DPB110501 DPA10401-DPB14901
PPLLWEGFELVPDK

SEQ ID NO: 6346 - protein, 14 aa, synthetic construct
  source 1..14: note = Seed: PPFLWMGYELHPDK; note = HLAs: DPA10103-DPB10101 DPA10103-DPB10201 DPA10103-DPB10202 DPA10103-DPB10401 DPA10103-DPB112601 DPA10103-DPB11501 DPA10103-DPB11601 DPA10103-DPB11901 DPA10103-DPB12301 DPA10103-DPB13101 DPA10103-DPB13401 DPA10103-DPB13901 DPA10103-DPB14001 DPA10103-DPB14101 DPA10103-DPB14801 DPA10103-DPB15001 DPA10103-DPB15901 DPA10104-DPB10101 DPA10104-DPB11501 DPA10105-DPB10101 DPA10105-DPB10401 DPA10105-DPB15001 DPA10106-DPB10101 DPA10201-DPB10101 DPA10201-DPB110601 DPA10201-DPB11501 DPA10201-DPB11601 DPA10201-DPB11901 DPA10202-DPB10101 DPA10202-DPB10201 DPA10202-DPB10202 DPA10202-DPB10401 DPA10202-DPB110601 DPA10202-DPB11901 DPA10202-DPB13101 DPA10202-DPB16501 DPA10301-DPB10101 DPA10301-DPB10201 DPA10301-DPB10202 DPA10301-DPB10401 DPA10301-DPB10402 DPA10301-DPB110501 DPA10301-DPB110601 DPA10301-DPB11801 DPA10301-DPB12301 DPA10301-DPB13901 DPA10301-DPB14001 DPA10301-DPB14901 DPA10301-DPB15501 DPA10301-DPB16501 DPA10301-DPB17501 DPA10301-DPB18001 DPA10401-DPB10101 DPA10401-DPB10201; note = HLAs: DPA10401-DPB10202 DPA10401-DPB10402 DPA10401-DPB10501 DPA10401-DPB110501 DPA10401-DPB14901
PPILWAGFELLPDK

SEQ ID NO: 6347 - protein, 14 aa, synthetic construct
  source 1..14: note = Seed: PPFLWMGYELHPDK; note = HLAs: DRB1_1001 DPA10103-DPB10101 DPA10103-DPB10201 DPA10103-DPB10202 DPA10103-DPB10401 DPA10103-DPB112601 DPA10103-DPB11501 DPA10103-DPB11601 DPA10103-DPB11901 DPA10103-DPB12301 DPA10103-DPB13101 DPA10103-DPB13401 DPA10103-DPB13901 DPA10103-DPB14001 DPA10103-DPB14101 DPA10103-DPB14801 DPA10103-DPB15001 DPA10103-DPB15901 DPA10104-DPB10101 DPA10104-DPB11501 DPA10105-DPB10101 DPA10105-DPB10401 DPA10105-DPB15001 DPA10106-DPB10101 DPA10201-DPB10101 DPA10201-DPB110601 DPA10201-DPB11501 DPA10201-DPB11601 DPA10201-DPB11901 DPA10202-DPB10101 DPA10202-DPB10201 DPA10202-DPB10202 DPA10202-DPB10401 DPA10202-DPB110601 DPA10202-DPB11901 DPA10202-DPB13101 DPA10202-DPB16501 DPA10301-DPB10101 DPA10301-DPB10201 DPA10301-DPB10202 DPA10301-DPB10401 DPA10301-DPB10402 DPA10301-DPB110501 DPA10301-DPB110601 DPA10301-DPB11801 DPA10301-DPB12301 DPA10301-DPB13901 DPA10301-DPB14001 DPA10301-DPB14901 DPA10301-DPB15501 DPA10301-DPB16501 DPA10301-DPB17501 DPA10301-DPB18001 DPA10401-DPB10101 DPA10401-DPB10201; note = HLAs: DPA10401-DPB10202 DPA10401-DPB10402 DPA10401-DPB10501 DPA10401-DPB110501 DPA10401-DPB14901
PPFLWNGFELMPDK

SEQ ID NO: 6348 - protein, 14 aa, synthetic construct
  source 1..14: note = Seed: PPFLWMGYELHPDK; note = HLAs: DPA10103-DPB10101 DPA10103-DPB10201 DPA10103-DPB10202 DPA10103-DPB10401 DPA10103-DPB112601 DPA10103-DPB11501 DPA10103-DPB11601 DPA10103-DPB11901 DPA10103-DPB12301 DPA10103-DPB13101 DPA10103-DPB13401 DPA10103-DPB13901 DPA10103-DPB14001 DPA10103-DPB14101 DPA10103-DPB14801 DPA10103-DPB15001 DPA10103-DPB15901 DPA10104-DPB10101 DPA10104-DPB11501 DPA10105-DPB10101 DPA10105-DPB10401 DPA10105-DPB15001 DPA10106-DPB10101 DPA10201-DPB10101 DPA10201-DPB110601 DPA10201-DPB11501 DPA10201-DPB11601 DPA10201-DPB11901 DPA10202-DPB10101 DPA10202-DPB10201 DPA10202-DPB10202 DPA10202-DPB10401 DPA10202-DPB110601 DPA10202-DPB11901 DPA10202-DPB13101 DPA10202-DPB16501 DPA10301-DPB10101 DPA10301-DPB10201 DPA10301-DPB10202 DPA10301-DPB10401 DPA10301-DPB10402 DPA10301-DPB110501 DPA10301-DPB110601 DPA10301-DPB11801 DPA10301-DPB12301 DPA10301-DPB13901 DPA10301-DPB14001 DPA10301-DPB14901 DPA10301-DPB15501 DPA10301-DPB16501 DPA10301-DPB17501 DPA10301-DPB18001 DPA10401-DPB10101 DPA10401-DPB10201; note = HLAs: DPA10401-DPB10202 DPA10401-DPB10402 DPA10401-DPB10501 DPA10401-DPB110501 DPA10401-DPB14901
PPYLWTGFELFPDK

SEQ ID NO: 6349 - protein, 14 aa, synthetic construct
  source 1..14: note = Seed: PPFLWMGYELHPDK; note = HLAs: DPA10103-DPB10101 DPA10103-DPB10201 DPA10103-DPB10202 DPA10103-DPB10401 DPA10103-DPB112601 DPA10103-DPB11501 DPA10103-DPB11601 DPA10103-DPB11901 DPA10103-DPB12301 DPA10103-DPB13101 DPA10103-DPB13401 DPA10103-DPB13901 DPA10103-DPB14001 DPA10103-DPB14101 DPA10103-DPB14801 DPA10103-DPB15001 DPA10103-DPB15901 DPA10104-DPB10101 DPA10104-DPB11501 DPA10105-DPB10101 DPA10105-DPB10401 DPA10105-DPB15001 DPA10106-DPB10101 DPA10201-DPB10101 DPA10201-DPB110601 DPA10201-DPB11501 DPA10201-DPB11601 DPA10201-DPB11901 DPA10202-DPB10101 DPA10202-DPB10201 DPA10202-DPB10202 DPA10202-DPB10401 DPA10202-DPB110601 DPA10202-DPB11901 DPA10202-DPB13101 DPA10202-DPB16501 DPA10301-DPB10101 DPA10301-DPB10201 DPA10301-DPB10202 DPA10301-DPB10401 DPA10301-DPB10402 DPA10301-DPB110501 DPA10301-DPB110601 DPA10301-DPB11801 DPA10301-DPB12301 DPA10301-DPB13901 DPA10301-DPB14001 DPA10301-DPB14901 DPA10301-DPB15501 DPA10301-DPB16501 DPA10301-DPB17501 DPA10301-DPB18001 DPA10401-DPB10101 DPA10401-DPB10201; note = HLAs: DPA10401-DPB10202 DPA10401-DPB10402 DPA10401-DPB10501 DPA10401-DPB110501 DPA10401-DPB14901
PPYLWEGFELIPDK

SEQ ID NO: 6350 - protein, 20 aa, synthetic construct
  source 1..20: note = Seed: KEPPFLWMGYELHPDKWTVQ; note = HLAs: DPA10103-DPB10101 DPA10103-DPB10201 DPA10103-DPB10202 DPA10103-DPB10401 DPA10103-DPB10402 DPA10103-DPB10501 DPA10103-DPB110501 DPA10103-DPB112601 DPA10103-DPB11501 DPA10103-DPB11601 DPA10103-DPB11801 DPA10103-DPB11901 DPA10103-DPB12301 DPA10103-DPB13101 DPA10103-DPB13401 DPA10103-DPB13901 DPA10103-DPB14001 DPA10103-DPB14101 DPA10103-DPB14801 DPA10103-DPB14901 DPA10103-DPB15001 DPA10103-DPB15101 DPA10103-DPB15501 DPA10103-DPB15901 DPA10103-DPB18001 DPA10104-DPB10101 DPA10104-DPB11501 DPA10105-DPB10101 DPA10105-DPB10401 DPA10105-DPB11801 DPA10105-DPB15001 DPA10106-DPB10101 DPA10201-DPB10101 DPA10201-DPB10201 DPA10201-DPB10202 DPA10201-DPB10401 DPA10201-DPB10501 DPA10201-DPB110601 DPA10201-DPB11501 DPA10201-DPB11601 DPA10201-DPB11901 DPA10201-DPB13401 DPA10201-DPB15501 DPA10202-DPB10101 DPA10202-DPB10201 DPA10202-DPB10202 DPA10202-DPB10401 DPA10202-DPB10501 DPA10202-DPB110601 DPA10202-DPB11101 DPA10202-DPB11301 DPA10202-DPB11801 DPA10202-DPB11901 DPA10202-DPB13101 DPA10202-DPB13801; note = HLAs: DPA10202-DPB15501 DPA10202-DPB16501 DPA10301-DPB10101 DPA10301-DPB10201 DPA10301-DPB10202 DPA10301-DPB10401 DPA10301-DPB10402 DPA10301-DPB110501 DPA10301-DPB110601 DPA10301-DPB11101 DPA10301-DPB11301 DPA10301-DPB11801 DPA10301-DPB12301 DPA10301-DPB13901 DPA10301-DPB14001 DPA10301-DPB14901 DPA10301-DPB15501 DPA10301-DPB16501 DPA10301-DPB17501 DPA10301-DPB18001 DPA10401-DPB10101 DPA10401-DPB10201 DPA10401-DPB10202 DPA10401-DPB10402 DPA10401-DPB10501 DPA10401-DPB110501 DPA10401-DPB14901
KEPPYLWSGFELMPDKWTVQ

SEQ ID NO: 6351 - protein, 20 aa, synthetic construct
  source 1..20: note = Seed: KEPPFLWMGYELHPDKWTVQ; note = HLAs: DRB1_0101 DRB1_1001 DPA10103-DPB10101 DPA10103-DPB10201 DPA10103-DPB10202 DPA10103-DPB10401 DPA10103-DPB10402 DPA10103-DPB10501 DPA10103-DPB110501 DPA10103-DPB112601 DPA10103-DPB11501 DPA10103-DPB11601 DPA10103-DPB11801 DPA10103-DPB11901 DPA10103-DPB12301 DPA10103-DPB13101 DPA10103-DPB13401 DPA10103-DPB13901 DPA10103-DPB14001 DPA10103-DPB14101 DPA10103-DPB14801 DPA10103-DPB14901 DPA10103-DPB15001 DPA10103-DPB15101 DPA10103-DPB15501 DPA10103-DPB15901 DPA10103-DPB18001 DPA10104-DPB10101 DPA10104-DPB11501 DPA10105-DPB10101 DPA10105-DPB10401 DPA10105-DPB11801 DPA10105-DPB15001 DPA10106-DPB10101 DPA10201-DPB10101 DPA10201-DPB10201 DPA10201-DPB10202 DPA10201-DPB10401 DPA10201-DPB10501 DPA10201-DPB110601 DPA10201-DPB11501 DPA10201-DPB11601 DPA10201-DPB11901 DPA10201-DPB13401 DPA10201-DPB15501 DPA10202-DPB10101 DPA10202-DPB10201 DPA10202-DPB10202 DPA10202-DPB10401 DPA10202-DPB10501 DPA10202-DPB110601 DPA10202-DPB11101 DPA10202-DPB11301 DPA10202-DPB11801 DPA10202-DPB11901; note = HLAs: DPA10202-DPB13101 DPA10202-DPB13801 DPA10202-DPB15501 DPA10202-DPB16501 DPA10301-DPB10101 DPA10301-DPB10201 DPA10301-DPB10202 DPA10301-DPB10401 DPA10301-DPB10402 DPA10301-DPB110501 DPA10301-DPB110601 DPA10301-DPB11101 DPA10301-DPB11301 DPA10301-DPB11801 DPA10301-DPB12301 DPA10301-DPB13901 DPA10301-DPB14001 DPA10301-DPB14901 DPA10301-DPB15501 DPA10301-DPB16501 DPA10301-DPB17501 DPA10301-DPB18001 DPA10401-DPB10101 DPA10401-DPB10201 DPA10401-DPB10202 DPA10401-DPB10402 DPA10401-DPB10501 DPA10401-DPB110501 DPA10401-DPB14901
KEPPFLWAGFELSPDKWTVQ

SEQ ID NO: 6352 - protein, 14 aa, synthetic construct
  source 1..14: note = Seed: PPFLWMGYELHPDK; note = HLAs: DRB1_1001
PPFLWLGTELHPDK

SEQ ID NO: 6353 - protein, 14 aa, synthetic construct
  source 1..14: note = Seed: PPFLWMGYELHPDK; note = HLAs: DPA10103-DPB10101 DPA10103-DPB10201 DPA10103-DPB10202 DPA10103-DPB10401 DPA10103-DPB112601 DPA10103-DPB11501 DPA10103-DPB11601 DPA10103-DPB11901 DPA10103-DPB12301 DPA10103-DPB13101 DPA10103-DPB13401 DPA10103-DPB13901 DPA10103-DPB14001 DPA10103-DPB14101 DPA10103-DPB14801 DPA10103-DPB15001 DPA10103-DPB15901 DPA10104-DPB10101 DPA10104-DPB11501 DPA10105-DPB10101 DPA10105-DPB10401 DPA10105-DPB15001 DPA10106-DPB10101 DPA10201-DPB10101 DPA10201-DPB110601 DPA10201-DPB11501 DPA10201-DPB11601 DPA10201-DPB11901 DPA10202-DPB10101 DPA10202-DPB10201 DPA10202-DPB10202 DPA10202-DPB10401 DPA10202-DPB110601 DPA10202-DPB11901 DPA10202-DPB13101 DPA10202-DPB16501 DPA10301-DPB10101 DPA10301-DPB10201 DPA10301-DPB10202 DPA10301-DPB10401 DPA10301-DPB10402 DPA10301-DPB110501 DPA10301-DPB110601 DPA10301-DPB11801 DPA10301-DPB12301 DPA10301-DPB13901 DPA10301-DPB14001 DPA10301-DPB14901 DPA10301-DPB15501 DPA10301-DPB16501 DPA10301-DPB17501 DPA10301-DPB18001 DPA10401-DPB10101 DPA10401-DPB10201; note = HLAs: DPA10401-DPB10202 DPA10401-DPB10402 DPA10401-DPB10501 DPA10401-DPB110501 DPA10401-DPB14901
PPFLWTGFELEPDK

SEQ ID NO: 6354 - protein, 14 aa, synthetic construct
  source 1..14: note = Seed: PPFLWMGYELHPDK; note = HLAs: DPA10103-DPB10101 DPA10103-DPB10201 DPA10103-DPB10202 DPA10103-DPB10401 DPA10103-DPB112601 DPA10103-DPB11501 DPA10103-DPB11601 DPA10103-DPB11901 DPA10103-DPB12301 DPA10103-DPB13101 DPA10103-DPB13401 DPA10103-DPB13901 DPA10103-DPB14001 DPA10103-DPB14101 DPA10103-DPB14801 DPA10103-DPB15001 DPA10103-DPB15901 DPA10104-DPB10101 DPA10104-DPB11501 DPA10105-DPB10101 DPA10105-DPB10401 DPA10105-DPB15001 DPA10106-DPB10101 DPA10201-DPB10101 DPA10201-DPB110601 DPA10201-DPB11501 DPA10201-DPB11601 DPA10201-DPB11901 DPA10202-DPB10101 DPA10202-DPB10201 DPA10202-DPB10202 DPA10202-DPB10401 DPA10202-DPB110601 DPA10202-DPB11901 DPA10202-DPB13101 DPA10202-DPB16501 DPA10301-DPB10101 DPA10301-DPB10201 DPA10301-DPB10202 DPA10301-DPB10401 DPA10301-DPB10402 DPA10301-DPB110501 DPA10301-DPB110601 DPA10301-DPB11801 DPA10301-DPB12301 DPA10301-DPB13901 DPA10301-DPB14001 DPA10301-DPB14901 DPA10301-DPB15501 DPA10301-DPB16501 DPA10301-DPB17501 DPA10301-DPB18001 DPA10401-DPB10101 DPA10401-DPB10201; note = HLAs: DPA10401-DPB10202 DPA10401-DPB10402 DPA10401-DPB10501 DPA10401-DPB110501 DPA10401-DPB14901
PPFLWEGFELTPDK

SEQ ID NO: 6355 - protein, 14 aa, synthetic construct
  source 1..14: note = Seed: PPFLWMGYELHPDK; note = HLAs: DPA10103-DPB10101 DPA10103-DPB10201 DPA10103-DPB10202 DPA10103-DPB10401 DPA10103-DPB112601 DPA10103-DPB11501 DPA10103-DPB11601 DPA10103-DPB11901 DPA10103-DPB12301 DPA10103-DPB13101 DPA10103-DPB13401 DPA10103-DPB13901 DPA10103-DPB14001 DPA10103-DPB14101 DPA10103-DPB14801 DPA10103-DPB15001 DPA10103-DPB15901 DPA10104-DPB10101 DPA10104-DPB11501 DPA10105-DPB10101 DPA10105-DPB10401 DPA10105-DPB15001 DPA10106-DPB10101 DPA10201-DPB10101 DPA10201-DPB110601 DPA10201-DPB11501 DPA10201-DPB11601 DPA10201-DPB11901 DPA10202-DPB10101 DPA10202-DPB10201 DPA10202-DPB10202 DPA10202-DPB10401 DPA10202-DPB110601 DPA10202-DPB11901 DPA10202-DPB13101 DPA10202-DPB16501 DPA10301-DPB10101 DPA10301-DPB10201 DPA10301-DPB10202 DPA10301-DPB10401 DPA10301-DPB10402 DPA10301-DPB110501 DPA10301-DPB110601 DPA10301-DPB11801 DPA10301-DPB12301 DPA10301-DPB13901 DPA10301-DPB14001 DPA10301-DPB14901 DPA10301-DPB15501 DPA10301-DPB16501 DPA10301-DPB17501 DPA10301-DPB18001 DPA10401-DPB10101 DPA10401-DPB10201; note = HLAs: DPA10401-DPB10202 DPA10401-DPB10402 DPA10401-DPB10501 DPA10401-DPB110501 DPA10401-DPB14901
PPMLWSGFELLPDK

SEQ ID NO: 6356 - protein, 14 aa, synthetic construct
  source 1..14: note = Seed: PPFLWMGYELHPDK; note = HLAs: DRB1_1001 DPA10103-DPB10101 DPA10103-DPB10201 DPA10103-DPB10202 DPA10103-DPB10401 DPA10103-DPB112601 DPA10103-DPB11501 DPA10103-DPB11601 DPA10103-DPB11901 DPA10103-DPB12301 DPA10103-DPB13101 DPA10103-DPB13401 DPA10103-DPB13901 DPA10103-DPB14001 DPA10103-DPB14101 DPA10103-DPB14801 DPA10103-DPB15001 DPA10103-DPB15901 DPA10104-DPB10101 DPA10104-DPB11501 DPA10105-DPB10101 DPA10105-DPB10401 DPA10105-DPB15001 DPA10106-DPB10101 DPA10201-DPB10101 DPA10201-DPB110601 DPA10201-DPB11501 DPA10201-DPB11601 DPA10201-DPB11901 DPA10202-DPB10101 DPA10202-DPB10201 DPA10202-DPB10202 DPA10202-DPB10401 DPA10202-DPB110601 DPA10202-DPB11901 DPA10202-DPB13101 DPA10202-DPB16501 DPA10301-DPB10101 DPA10301-DPB10201 DPA10301-DPB10202 DPA10301-DPB10401 DPA10301-DPB10402 DPA10301-DPB110501 DPA10301-DPB110601 DPA10301-DPB11801 DPA10301-DPB12301 DPA10301-DPB13901 DPA10301-DPB14001 DPA10301-DPB14901 DPA10301-DPB15501 DPA10301-DPB16501 DPA10301-DPB17501 DPA10301-DPB18001 DPA10401-DPB10101 DPA10401-DPB10201; note = HLAs: DPA10401-DPB10202 DPA10401-DPB10402 DPA10401-DPB10501 DPA10401-DPB110501 DPA10401-DPB14901
PPFLWGGFELLPDK

SEQ ID NO: 6357 - protein, 20 aa, synthetic construct
  source 1..20: note = Seed: KEPPFLWMGYELHPDKWTVQ; note = HLAs: DRB1_0101 DPA10103-DPB10101 DPA10103-DPB10201 DPA10103-DPB10202 DPA10103-DPB10401 DPA10103-DPB10402 DPA10103-DPB10501 DPA10103-DPB110501 DPA10103-DPB112601 DPA10103-DPB11501 DPA10103-DPB11601 DPA10103-DPB11801 DPA10103-DPB11901 DPA10103-DPB12301 DPA10103-DPB13101 DPA10103-DPB13401 DPA10103-DPB13901 DPA10103-DPB14001 DPA10103-DPB14101 DPA10103-DPB14801 DPA10103-DPB14901 DPA10103-DPB15001 DPA10103-DPB15101 DPA10103-DPB15501 DPA10103-DPB15901 DPA10103-DPB18001 DPA10104-DPB10101 DPA10104-DPB11501 DPA10105-DPB10101 DPA10105-DPB10401 DPA10105-DPB11801 DPA10105-DPB15001 DPA10106-DPB10101 DPA10201-DPB10101 DPA10201-DPB10201 DPA10201-DPB10202 DPA10201-DPB10401 DPA10201-DPB10501 DPA10201-DPB110601 DPA10201-DPB11501 DPA10201-DPB11601 DPA10201-DPB11901 DPA10201-DPB13401 DPA10201-DPB15501 DPA10202-DPB10101 DPA10202-DPB10201 DPA10202-DPB10202 DPA10202-DPB10401 DPA10202-DPB10501 DPA10202-DPB110601 DPA10202-DPB11101 DPA10202-DPB11301 DPA10202-DPB11801 DPA10202-DPB11901 DPA10202-DPB13101; note = HLAs: DPA10202-DPB13801 DPA10202-DPB15501 DPA10202-DPB16501 DPA10301-DPB10101 DPA10301-DPB10201 DPA10301-DPB10202 DPA10301-DPB10401 DPA10301-DPB10402 DPA10301-DPB110501 DPA10301-DPB110601 DPA10301-DPB11101 DPA10301-DPB11301 DPA10301-DPB11801 DPA10301-DPB12301 DPA10301-DPB13901 DPA10301-DPB14001 DPA10301-DPB14901 DPA10301-DPB15501 DPA10301-DPB16501 DPA10301-DPB17501 DPA10301-DPB18001 DPA10401-DPB10101 DPA10401-DPB10201 DPA10401-DPB10202 DPA10401-DPB10402 DPA10401-DPB10501 DPA10401-DPB110501 DPA10401-DPB14901
KEPPYLWHGFELIPDKWTVQ

SEQ ID NO: 6358 - protein, 14 aa, synthetic construct
  source 1..14: note = Seed: PPFLWMGYELHPDK; note = HLAs: DRB1_1001 DPA10103-DPB10101 DPA10103-DPB10201 DPA10103-DPB10202 DPA10103-DPB10401 DPA10103-DPB112601 DPA10103-DPB11501 DPA10103-DPB11601 DPA10103-DPB11901 DPA10103-DPB12301 DPA10103-DPB13101 DPA10103-DPB13401 DPA10103-DPB13901 DPA10103-DPB14001 DPA10103-DPB14101 DPA10103-DPB14801 DPA10103-DPB15001 DPA10103-DPB15901 DPA10104-DPB10101 DPA10104-DPB11501 DPA10105-DPB10101 DPA10105-DPB10401 DPA10105-DPB15001 DPA10106-DPB10101 DPA10201-DPB10101 DPA10201-DPB110601 DPA10201-DPB11501 DPA10201-DPB11601 DPA10201-DPB11901 DPA10202-DPB10101 DPA10202-DPB10201 DPA10202-DPB10202 DPA10202-DPB10401 DPA10202-DPB110601 DPA10202-DPB11901 DPA10202-DPB13101 DPA10202-DPB16501 DPA10301-DPB10101 DPA10301-DPB10201 DPA10301-DPB10202 DPA10301-DPB10401 DPA10301-DPB10402 DPA10301-DPB110501 DPA10301-DPB110601 DPA10301-DPB11801 DPA10301-DPB12301 DPA10301-DPB13901 DPA10301-DPB14001 DPA10301-DPB14901 DPA10301-DPB15501 DPA10301-DPB16501 DPA10301-DPB17501 DPA10301-DPB18001 DPA10401-DPB10101 DPA10401-DPB10201; note = HLAs: DPA10401-DPB10202 DPA10401-DPB10402 DPA10401-DPB10501 DPA10401-DPB110501 DPA10401-DPB14901
PPFLWVGFELNPDK

SEQ ID NO: 6359 - protein, 20 aa, synthetic construct
  source 1..20: note = Seed: KEPPFLWMGYELHPDKWTVQ; note = HLAs: DRB1_0101 DRB1_1001 DPA10103-DPB10101 DPA10103-DPB10201 DPA10103-DPB10202 DPA10103-DPB10401 DPA10103-DPB10402 DPA10103-DPB10501 DPA10103-DPB110501 DPA10103-DPB112601 DPA10103-DPB11501 DPA10103-DPB11601 DPA10103-DPB11801 DPA10103-DPB11901 DPA10103-DPB12301 DPA10103-DPB13101 DPA10103-DPB13401 DPA10103-DPB13901 DPA10103-DPB14001 DPA10103-DPB14101 DPA10103-DPB14801 DPA10103-DPB14901 DPA10103-DPB15001 DPA10103-DPB15101 DPA10103-DPB15501 DPA10103-DPB15901 DPA10103-DPB18001 DPA10104-DPB10101 DPA10104-DPB11501 DPA10105-DPB10101 DPA10105-DPB10401 DPA10105-DPB11801 DPA10105-DPB15001 DPA10106-DPB10101 DPA10201-DPB10101 DPA10201-DPB10201 DPA10201-DPB10202 DPA10201-DPB10401 DPA10201-DPB10501 DPA10201-DPB110601 DPA10201-DPB11501 DPA10201-DPB11601 DPA10201-DPB11901 DPA10201-DPB13401 DPA10201-DPB15501 DPA10202-DPB10101 DPA10202-DPB10201 DPA10202-DPB10202 DPA10202-DPB10401 DPA10202-DPB10501 DPA10202-DPB110601 DPA10202-DPB11101 DPA10202-DPB11301 DPA10202-DPB11801 DPA10202-DPB11901; note = HLAs: DPA10202-DPB13101 DPA10202-DPB13801 DPA10202-DPB15501 DPA10202-DPB16501 DPA10301-DPB10101 DPA10301-DPB10201 DPA10301-DPB10202 DPA10301-DPB10401 DPA10301-DPB10402 DPA10301-DPB110501 DPA10301-DPB110601 DPA10301-DPB11101 DPA10301-DPB11301 DPA10301-DPB11801 DPA10301-DPB12301 DPA10301-DPB13901 DPA10301-DPB14001 DPA10301-DPB14901 DPA10301-DPB15501 DPA10301-DPB16501 DPA10301-DPB17501 DPA10301-DPB18001 DPA10401-DPB10101 DPA10401-DPB10201 DPA10401-DPB10202 DPA10401-DPB10402 DPA10401-DPB10501 DPA10401-DPB110501 DPA10401-DPB14901
KEPPFLWNGFELFPDKWTVQ

SEQ ID NO: 6360 - protein, 20 aa, synthetic construct
  source 1..20: note = Seed: KEPPFLWMGYELHPDKWTVQ; note = HLAs: DRB1_1001 DPA10103-DPB10101 DPA10103-DPB10201 DPA10103-DPB10202 DPA10103-DPB10401 DPA10103-DPB10402 DPA10103-DPB10501 DPA10103-DPB110501 DPA10103-DPB112601 DPA10103-DPB11501 DPA10103-DPB11601 DPA10103-DPB11801 DPA10103-DPB11901 DPA10103-DPB12301 DPA10103-DPB13101 DPA10103-DPB13401 DPA10103-DPB13901 DPA10103-DPB14001 DPA10103-DPB14101 DPA10103-DPB14801 DPA10103-DPB14901 DPA10103-DPB15001 DPA10103-DPB15101 DPA10103-DPB15501 DPA10103-DPB15901 DPA10103-DPB18001 DPA10104-DPB10101 DPA10104-DPB11501 DPA10105-DPB10101 DPA10105-DPB10401 DPA10105-DPB11801 DPA10105-DPB15001 DPA10106-DPB10101 DPA10201-DPB10101 DPA10201-DPB10201 DPA10201-DPB10202 DPA10201-DPB10401 DPA10201-DPB10501 DPA10201-DPB110601 DPA10201-DPB11501 DPA10201-DPB11601 DPA10201-DPB11901 DPA10201-DPB13401 DPA10201-DPB15501 DPA10202-DPB10101 DPA10202-DPB10201 DPA10202-DPB10202 DPA10202-DPB10401 DPA10202-DPB10501 DPA10202-DPB110601 DPA10202-DPB11101 DPA10202-DPB11301 DPA10202-DPB11801 DPA10202-DPB11901 DPA10202-DPB13101; note = HLAs: DPA10202-DPB13801 DPA10202-DPB15501 DPA10202-DPB16501 DPA10301-DPB10101 DPA10301-DPB10201 DPA10301-DPB10202 DPA10301-DPB10401 DPA10301-DPB10402 DPA10301-DPB110501 DPA10301-DPB110601 DPA10301-DPB11101 DPA10301-DPB11301 DPA10301-DPB11801 DPA10301-DPB12301 DPA10301-DPB13901 DPA10301-DPB14001 DPA10301-DPB14901 DPA10301-DPB15501 DPA10301-DPB16501 DPA10301-DPB17501 DPA10301-DPB18001 DPA10401-DPB10101 DPA10401-DPB10201 DPA10401-DPB10202 DPA10401-DPB10402 DPA10401-DPB10501 DPA10401-DPB110501 DPA10401-DPB14901
KEPPFLWEGFELTPDKWTVQ

SEQ ID NO: 6361 - protein, 20 aa, synthetic construct
  source 1..20: note = Seed: KEPPFLWMGYELHPDKWTVQ; note = HLAs: DPA10103-DPB10101 DPA10103-DPB10201 DPA10103-DPB10202 DPA10103-DPB10401 DPA10103-DPB10402 DPA10103-DPB10501 DPA10103-DPB110501 DPA10103-DPB112601 DPA10103-DPB11501 DPA10103-DPB11601 DPA10103-DPB11801 DPA10103-DPB11901 DPA10103-DPB12301 DPA10103-DPB13101 DPA10103-DPB13401 DPA10103-DPB13901 DPA10103-DPB14001 DPA10103-DPB14101 DPA10103-DPB14801 DPA10103-DPB14901 DPA10103-DPB15001 DPA10103-DPB15101 DPA10103-DPB15501 DPA10103-DPB15901 DPA10103-DPB18001 DPA10104-DPB10101 DPA10104-DPB11501 DPA10105-DPB10101 DPA10105-DPB10401 DPA10105-DPB11801 DPA10105-DPB15001 DPA10106-DPB10101 DPA10201-DPB10101 DPA10201-DPB10201 DPA10201-DPB10202 DPA10201-DPB10401 DPA10201-DPB10501 DPA10201-DPB110601 DPA10201-DPB11501 DPA10201-DPB11601 DPA10201-DPB11901 DPA10201-DPB13401 DPA10201-DPB15501 DPA10202-DPB10101 DPA10202-DPB10201 DPA10202-DPB10202 DPA10202-DPB10401 DPA10202-DPB10501 DPA10202-DPB110601 DPA10202-DPB11101 DPA10202-DPB11301 DPA10202-DPB11801 DPA10202-DPB11901 DPA10202-DPB13101 DPA10202-DPB13801; note = HLAs: DPA10202-DPB15501 DPA10202-DPB16501 DPA10301-DPB10101 DPA10301-DPB10201 DPA10301-DPB10202 DPA10301-DPB10401 DPA10301-DPB10402 DPA10301-DPB110501 DPA10301-DPB110601 DPA10301-DPB11101 DPA10301-DPB11301 DPA10301-DPB11801 DPA10301-DPB12301 DPA10301-DPB13901 DPA10301-DPB14001 DPA10301-DPB14901 DPA10301-DPB15501 DPA10301-DPB16501 DPA10301-DPB17501 DPA10301-DPB18001 DPA10401-DPB10101 DPA10401-DPB10201 DPA10401-DPB10202 DPA10401-DPB10402 DPA10401-DPB10501 DPA10401-DPB110501 DPA10401-DPB14901
KEPPFLWEGFELFPDKWTVQ

SEQ ID NO: 6362 - protein, 14 aa, synthetic construct
  source 1..14: note = Seed: PPFLWMGYELHPDK; note = HLAs: DRB1_1001 DPA10103-DPB10101 DPA10103-DPB10201 DPA10103-DPB10202 DPA10103-DPB10401 DPA10103-DPB112601 DPA10103-DPB11501 DPA10103-DPB11601 DPA10103-DPB11901 DPA10103-DPB12301 DPA10103-DPB13101 DPA10103-DPB13401 DPA10103-DPB13901 DPA10103-DPB14001 DPA10103-DPB14101 DPA10103-DPB14801 DPA10103-DPB15001 DPA10103-DPB15901 DPA10104-DPB10101 DPA10104-DPB11501 DPA10105-DPB10101 DPA10105-DPB10401 DPA10105-DPB15001 DPA10106-DPB10101 DPA10201-DPB10101 DPA10201-DPB110601 DPA10201-DPB11501 DPA10201-DPB11601 DPA10201-DPB11901 DPA10202-DPB10101 DPA10202-DPB10201 DPA10202-DPB10202 DPA10202-DPB10401 DPA10202-DPB110601 DPA10202-DPB11901 DPA10202-DPB13101 DPA10202-DPB16501 DPA10301-DPB10101 DPA10301-DPB10201 DPA10301-DPB10202 DPA10301-DPB10401 DPA10301-DPB10402 DPA10301-DPB110501 DPA10301-DPB110601 DPA10301-DPB11801 DPA10301-DPB12301 DPA10301-DPB13901 DPA10301-DPB14001 DPA10301-DPB14901 DPA10301-DPB15501 DPA10301-DPB16501 DPA10301-DPB17501 DPA10301-DPB18001 DPA10401-DPB10101 DPA10401-DPB10201; note = HLAs: DPA10401-DPB10202 DPA10401-DPB10402 DPA10401-DPB10501 DPA10401-DPB110501 DPA10401-DPB14901
PPYLWVGFELVPDK

SEQ ID NO: 6363 - protein, 14 aa, synthetic construct
  source 1..14: note = Seed: PPFLWMGYELHPDK; note = HLAs: DRB1_1001 DPA10103-DPB10101 DPA10103-DPB10201 DPA10103-DPB10202 DPA10103-DPB10401 DPA10103-DPB112601 DPA10103-DPB11501 DPA10103-DPB11601 DPA10103-DPB11901 DPA10103-DPB12301 DPA10103-DPB13101 DPA10103-DPB13401 DPA10103-DPB13901 DPA10103-DPB14001 DPA10103-DPB14101 DPA10103-DPB14801 DPA10103-DPB15001 DPA10103-DPB15901 DPA10104-DPB10101 DPA10104-DPB11501 DPA10105-DPB10101 DPA10105-DPB10401 DPA10105-DPB15001 DPA10106-DPB10101 DPA10201-DPB10101 DPA10201-DPB110601 DPA10201-DPB11501 DPA10201-DPB11601 DPA10201-DPB11901 DPA10202-DPB10101 DPA10202-DPB10201 DPA10202-DPB10202 DPA10202-DPB10401 DPA10202-DPB110601 DPA10202-DPB11901 DPA10202-DPB13101 DPA10202-DPB16501 DPA10301-DPB10101 DPA10301-DPB10201 DPA10301-DPB10202 DPA10301-DPB10401 DPA10301-DPB10402 DPA10301-DPB110501 DPA10301-DPB110601 DPA10301-DPB11801 DPA10301-DPB12301 DPA10301-DPB13901 DPA10301-DPB14001 DPA10301-DPB14901 DPA10301-DPB15501 DPA10301-DPB16501 DPA10301-DPB17501 DPA10301-DPB18001 DPA10401-DPB10101 DPA10401-DPB10201; note = HLAs: DPA10401-DPB10202 DPA10401-DPB10402 DPA10401-DPB10501 DPA10401-DPB110501 DPA10401-DPB14901
PPFLWAGFELSPDK

SEQ ID NO: 6364 - protein, 20 aa, synthetic construct
  source 1..20: note = Seed: KEPPFLWMGYELHPDKWTVQ; note = HLAs: DRB1_0101 DPA10103-DPB10101 DPA10103-DPB10201 DPA10103-DPB10202 DPA10103-DPB10401 DPA10103-DPB10402 DPA10103-DPB10501 DPA10103-DPB110501 DPA10103-DPB112601 DPA10103-DPB11501 DPA10103-DPB11601 DPA10103-DPB11801 DPA10103-DPB11901 DPA10103-DPB12301 DPA10103-DPB13101 DPA10103-DPB13401 DPA10103-DPB13901 DPA10103-DPB14001 DPA10103-DPB14101 DPA10103-DPB14801 DPA10103-DPB14901 DPA10103-DPB15001 DPA10103-DPB15101 DPA10103-DPB15501 DPA10103-DPB15901 DPA10103-DPB18001 DPA10104-DPB10101 DPA10104-DPB11501 DPA10105-DPB10101 DPA10105-DPB10401 DPA10105-DPB11801 DPA10105-DPB15001 DPA10106-DPB10101 DPA10201-DPB10101 DPA10201-DPB10201 DPA10201-DPB10202 DPA10201-DPB10401 DPA10201-DPB10501 DPA10201-DPB110601 DPA10201-DPB11501 DPA10201-DPB11601 DPA10201-DPB11901 DPA10201-DPB13401 DPA10201-DPB15501 DPA10202-DPB10101 DPA10202-DPB10201 DPA10202-DPB10202 DPA10202-DPB10401 DPA10202-DPB10501 DPA10202-DPB110601 DPA10202-DPB11101 DPA10202-DPB11301 DPA10202-DPB11801 DPA10202-DPB11901 DPA10202-DPB13101; note = HLAs: DPA10202-DPB13801 DPA10202-DPB15501 DPA10202-DPB16501 DPA10301-DPB10101 DPA10301-DPB10201 DPA10301-DPB10202 DPA10301-DPB10401 DPA10301-DPB10402 DPA10301-DPB110501 DPA10301-DPB110601 DPA10301-DPB11101 DPA10301-DPB11301 DPA10301-DPB11801 DPA10301-DPB12301 DPA10301-DPB13901 DPA10301-DPB14001 DPA10301-DPB14901 DPA10301-DPB15501 DPA10301-DPB16501 DPA10301-DPB17501 DPA10301-DPB18001 DPA10401-DPB10101 DPA10401-DPB10201 DPA10401-DPB10202 DPA10401-DPB10402 DPA10401-DPB10501 DPA10401-DPB110501 DPA10401-DPB14901
KEPPWLWTGFELIPDKWTVQ

SEQ ID NO: 6365 - protein, 14 aa, synthetic construct
  source 1..14: note = Seed: PPFLWMGYELHPDK; note = HLAs: DPA10103-DPB10101 DPA10103-DPB10201 DPA10103-DPB10202 DPA10103-DPB10401 DPA10103-DPB112601 DPA10103-DPB11501 DPA10103-DPB11601 DPA10103-DPB11901 DPA10103-DPB12301 DPA10103-DPB13101 DPA10103-DPB13401 DPA10103-DPB13901 DPA10103-DPB14001 DPA10103-DPB14101 DPA10103-DPB14801 DPA10103-DPB15001 DPA10103-DPB15901 DPA10104-DPB10101 DPA10104-DPB11501 DPA10105-DPB10101 DPA10105-DPB10401 DPA10105-DPB15001 DPA10106-DPB10101 DPA10201-DPB10101 DPA10201-DPB110601 DPA10201-DPB11501 DPA10201-DPB11601 DPA10201-DPB11901 DPA10202-DPB10101 DPA10202-DPB10201 DPA10202-DPB10202 DPA10202-DPB10401 DPA10202-DPB110601 DPA10202-DPB11901 DPA10202-DPB13101 DPA10202-DPB16501 DPA10301-DPB10101 DPA10301-DPB10201 DPA10301-DPB10202 DPA10301-DPB10401 DPA10301-DPB10402 DPA10301-DPB110501 DPA10301-DPB110601 DPA10301-DPB11801 DPA10301-DPB12301 DPA10301-DPB13901 DPA10301-DPB14001 DPA10301-DPB14901 DPA10301-DPB15501 DPA10301-DPB16501 DPA10301-DPB17501 DPA10301-DPB18001 DPA10401-DPB10101 DPA10401-DPB10201; note = HLAs: DPA10401-DPB10202 DPA10401-DPB10402 DPA10401-DPB10501 DPA10401-DPB110501 DPA10401-DPB14901
PPILWEGFELVPDK

SEQ ID NO: 6366 - protein, 14 aa, synthetic construct
  source 1..14: note = Seed: PPFLWMGYELHPDK; note = HLAs: DPA10103-DPB10101 DPA10103-DPB10201 DPA10103-DPB10202 DPA10103-DPB10401 DPA10103-DPB112601 DPA10103-DPB11501 DPA10103-DPB11601 DPA10103-DPB11901 DPA10103-DPB12301 DPA10103-DPB13101 DPA10103-DPB13401 DPA10103-DPB13901 DPA10103-DPB14001 DPA10103-DPB14101 DPA10103-DPB14801 DPA10103-DPB15001 DPA10103-DPB15901 DPA10104-DPB10101 DPA10104-DPB11501 DPA10105-DPB10101 DPA10105-DPB10401 DPA10105-DPB15001 DPA10106-DPB10101 DPA10201-DPB10101 DPA10201-DPB110601 DPA10201-DPB11501 DPA10201-DPB11601 DPA10201-DPB11901 DPA10202-DPB10101 DPA10202-DPB10201 DPA10202-DPB10202 DPA10202-DPB10401 DPA10202-DPB110601 DPA10202-DPB11901 DPA10202-DPB13101 DPA10202-DPB16501 DPA10301-DPB10101 DPA10301-DPB10201 DPA10301-DPB10202 DPA10301-DPB10401 DPA10301-DPB10402 DPA10301-DPB110501 DPA10301-DPB110601 DPA10301-DPB11801 DPA10301-DPB12301 DPA10301-DPB13901 DPA10301-DPB14001 DPA10301-DPB14901 DPA10301-DPB15501 DPA10301-DPB16501 DPA10301-DPB17501 DPA10301-DPB18001 DPA10401-DPB10101 DPA10401-DPB10201; note = HLAs: DPA10401-DPB10202 DPA10401-DPB10402 DPA10401-DPB10501 DPA10401-DPB110501 DPA10401-DPB14901
PPYLWHGFELIPDK

SEQ ID NO: 6367 - protein, 14 aa, synthetic construct
  source 1..14: note = Seed: PPFLWMGYELHPDK; note = HLAs: DRB1_1001 DPA10103-DPB10101 DPA10103-DPB10201 DPA10103-DPB10202 DPA10103-DPB10401 DPA10103-DPB112601 DPA10103-DPB11501 DPA10103-DPB11601 DPA10103-DPB11901 DPA10103-DPB12301 DPA10103-DPB13101 DPA10103-DPB13401 DPA10103-DPB13901 DPA10103-DPB14001 DPA10103-DPB14101 DPA10103-DPB14801 DPA10103-DPB15001 DPA10103-DPB15901 DPA10104-DPB10101 DPA10104-DPB11501 DPA10105-DPB10101 DPA10105-DPB10401 DPA10105-DPB15001 DPA10106-DPB10101 DPA10201-DPB10101 DPA10201-DPB110601 DPA10201-DPB11501 DPA10201-DPB11601 DPA10201-DPB11901 DPA10202-DPB10101 DPA10202-DPB10201 DPA10202-DPB10202 DPA10202-DPB10401 DPA10202-DPB110601 DPA10202-DPB11901 DPA10202-DPB13101 DPA10202-DPB16501 DPA10301-DPB10101 DPA10301-DPB10201 DPA10301-DPB10202 DPA10301-DPB10401 DPA10301-DPB10402 DPA10301-DPB110501 DPA10301-DPB110601 DPA10301-DPB11801 DPA10301-DPB12301 DPA10301-DPB13901 DPA10301-DPB14001 DPA10301-DPB14901 DPA10301-DPB15501 DPA10301-DPB16501 DPA10301-DPB17501 DPA10301-DPB18001 DPA10401-DPB10101 DPA10401-DPB10201; note = HLAs: DPA10401-DPB10202 DPA10401-DPB10402 DPA10401-DPB10501 DPA10401-DPB110501 DPA10401-DPB14901
PPYLWIGFELVPDK

SEQ ID NO: 6368 - protein, 14 aa, synthetic construct
  source 1..14: note = Seed: PPFLWMGYELHPDK; note = HLAs: DRB1_1001 DPA10103-DPB10101 DPA10103-DPB10201 DPA10103-DPB10202 DPA10103-DPB10401 DPA10103-DPB112601 DPA10103-DPB11501 DPA10103-DPB11601 DPA10103-DPB11901 DPA10103-DPB12301 DPA10103-DPB13101 DPA10103-DPB13401 DPA10103-DPB13901 DPA10103-DPB14001 DPA10103-DPB14101 DPA10103-DPB14801 DPA10103-DPB15001 DPA10103-DPB15901 DPA10104-DPB10101 DPA10104-DPB11501 DPA10105-DPB10101 DPA10105-DPB10401 DPA10105-DPB15001 DPA10106-DPB10101 DPA10201-DPB10101 DPA10201-DPB110601 DPA10201-DPB11501 DPA10201-DPB11601 DPA10201-DPB11901 DPA10202-DPB10101 DPA10202-DPB10201 DPA10202-DPB10202 DPA10202-DPB10401 DPA10202-DPB110601 DPA10202-DPB11901 DPA10202-DPB13101 DPA10202-DPB16501 DPA10301-DPB10101 DPA10301-DPB10201 DPA10301-DPB10202 DPA10301-DPB10401 DPA10301-DPB10402 DPA10301-DPB110501 DPA10301-DPB110601 DPA10301-DPB11801 DPA10301-DPB12301 DPA10301-DPB13901 DPA10301-DPB14001 DPA10301-DPB14901 DPA10301-DPB15501 DPA10301-DPB16501 DPA10301-DPB17501 DPA10301-DPB18001 DPA10401-DPB10101 DPA10401-DPB10201; note = HLAs: DPA10401-DPB10202 DPA10401-DPB10402 DPA10401-DPB10501 DPA10401-DPB110501 DPA10401-DPB14901
PPFLWLGFELMPDK

SEQ ID NO: 6369 - protein, 20 aa, synthetic construct
  source 1..20: note = Seed: KEPPFLWMGYELHPDKWTVQ; note = HLAs: DRB1_0101 DRB1_1001 DPA10103-DPB10101 DPA10103-DPB10201 DPA10103-DPB10202 DPA10103-DPB10401 DPA10103-DPB10402 DPA10103-DPB10501 DPA10103-DPB110501 DPA10103-DPB112601 DPA10103-DPB11501 DPA10103-DPB11601 DPA10103-DPB11801 DPA10103-DPB11901 DPA10103-DPB12301 DPA10103-DPB13101 DPA10103-DPB13401 DPA10103-DPB13901 DPA10103-DPB14001 DPA10103-DPB14101 DPA10103-DPB14801 DPA10103-DPB14901 DPA10103-DPB15001 DPA10103-DPB15101 DPA10103-DPB15501 DPA10103-DPB15901 DPA10103-DPB18001 DPA10104-DPB10101 DPA10104-DPB11501 DPA10105-DPB10101 DPA10105-DPB10401 DPA10105-DPB11801 DPA10105-DPB15001 DPA10106-DPB10101 DPA10201-DPB10101 DPA10201-DPB10201 DPA10201-DPB10202 DPA10201-DPB10401 DPA10201-DPB10501 DPA10201-DPB110601 DPA10201-DPB11501 DPA10201-DPB11601 DPA10201-DPB11901 DPA10201-DPB13401 DPA10201-DPB15501 DPA10202-DPB10101 DPA10202-DPB10201 DPA10202-DPB10202 DPA10202-DPB10401 DPA10202-DPB10501 DPA10202-DPB110601 DPA10202-DPB11101 DPA10202-DPB11301 DPA10202-DPB11801 DPA10202-DPB11901; note = HLAs: DPA10202-DPB13101 DPA10202-DPB13801 DPA10202-DPB15501 DPA10202-DPB16501 DPA10301-DPB10101 DPA10301-DPB10201 DPA10301-DPB10202 DPA10301-DPB10401 DPA10301-DPB10402 DPA10301-DPB110501 DPA10301-DPB110601 DPA10301-DPB11101 DPA10301-DPB11301 DPA10301-DPB11801 DPA10301-DPB12301 DPA10301-DPB13901 DPA10301-DPB14001 DPA10301-DPB14901 DPA10301-DPB15501 DPA10301-DPB16501 DPA10301-DPB17501 DPA10301-DPB18001 DPA10401-DPB10101 DPA10401-DPB10201 DPA10401-DPB10202 DPA10401-DPB10402 DPA10401-DPB10501 DPA10401-DPB110501 DPA10401-DPB14901
KEPPYLWEGFELVPDKWTVQ

SEQ ID NO: 6370 - protein, 14 aa, synthetic construct
  source 1..14: note = Seed: PPFLWMGYELHPDK; note = HLAs: DPA10103-DPB10101 DPA10103-DPB10201 DPA10103-DPB10202 DPA10103-DPB10401 DPA10103-DPB112601 DPA10103-DPB11501 DPA10103-DPB11601 DPA10103-DPB11901 DPA10103-DPB12301 DPA10103-DPB13101 DPA10103-DPB13401 DPA10103-DPB13901 DPA10103-DPB14001 DPA10103-DPB14101 DPA10103-DPB14801 DPA10103-DPB15001 DPA10103-DPB15901 DPA10104-DPB10101 DPA10104-DPB11501 DPA10105-DPB10101 DPA10105-DPB10401 DPA10105-DPB15001 DPA10106-DPB10101 DPA10201-DPB10101 DPA10201-DPB110601 DPA10201-DPB11501 DPA10201-DPB11601 DPA10201-DPB11901 DPA10202-DPB10101 DPA10202-DPB10201 DPA10202-DPB10202 DPA10202-DPB10401 DPA10202-DPB110601 DPA10202-DPB11901 DPA10202-DPB13101 DPA10202-DPB16501 DPA10301-DPB10101 DPA10301-DPB10201 DPA10301-DPB10202 DPA10301-DPB10401 DPA10301-DPB10402 DPA10301-DPB110501 DPA10301-DPB110601 DPA10301-DPB11801 DPA10301-DPB12301 DPA10301-DPB13901 DPA10301-DPB14001 DPA10301-DPB14901 DPA10301-DPB15501 DPA10301-DPB16501 DPA10301-DPB17501 DPA10301-DPB18001 DPA10401-DPB10101 DPA10401-DPB10201; note = HLAs: DPA10401-DPB10202 DPA10401-DPB10402 DPA10401-DPB10501 DPA10401-DPB110501 DPA10401-DPB14901
PPLLWSGFELMPDK

SEQ ID NO: 6371 - protein, 14 aa, synthetic construct
  source 1..14: note = Seed: PPFLWMGYELHPDK; note = HLAs: DRB1_1001 DPA10103-DPB10101 DPA10103-DPB10201 DPA10103-DPB10202 DPA10103-DPB10401 DPA10103-DPB112601 DPA10103-DPB11501 DPA10103-DPB11601 DPA10103-DPB11901 DPA10103-DPB12301 DPA10103-DPB13101 DPA10103-DPB13401 DPA10103-DPB13901 DPA10103-DPB14001 DPA10103-DPB14101 DPA10103-DPB14801 DPA10103-DPB15001 DPA10103-DPB15901 DPA10104-DPB10101 DPA10104-DPB11501 DPA10105-DPB10101 DPA10105-DPB10401 DPA10105-DPB15001 DPA10106-DPB10101 DPA10201-DPB10101 DPA10201-DPB110601 DPA10201-DPB11501 DPA10201-DPB11601 DPA10201-DPB11901 DPA10202-DPB10101 DPA10202-DPB10201 DPA10202-DPB10202 DPA10202-DPB10401 DPA10202-DPB110601 DPA10202-DPB11901 DPA10202-DPB13101 DPA10202-DPB16501 DPA10301-DPB10101 DPA10301-DPB10201 DPA10301-DPB10202 DPA10301-DPB10401 DPA10301-DPB10402 DPA10301-DPB110501 DPA10301-DPB110601 DPA10301-DPB11801 DPA10301-DPB12301 DPA10301-DPB13901 DPA10301-DPB14001 DPA10301-DPB14901 DPA10301-DPB15501 DPA10301-DPB16501 DPA10301-DPB17501 DPA10301-DPB18001 DPA10401-DPB10101 DPA10401-DPB10201; note = HLAs: DPA10401-DPB10202 DPA10401-DPB10402 DPA10401-DPB10501 DPA10401-DPB110501 DPA10401-DPB14901
PPYLWSGFELMPDK

SEQ ID NO: 6372 - protein, 14 aa, synthetic construct
  source 1..14: note = Seed: PPFLWMGYELHPDK; note = HLAs: DPA10103-DPB10101 DPA10103-DPB10201 DPA10103-DPB10202 DPA10103-DPB10401 DPA10103-DPB112601 DPA10103-DPB11501 DPA10103-DPB11601 DPA10103-DPB11901 DPA10103-DPB12301 DPA10103-DPB13101 DPA10103-DPB13401 DPA10103-DPB13901 DPA10103-DPB14001 DPA10103-DPB14101 DPA10103-DPB14801 DPA10103-DPB15001 DPA10103-DPB15901 DPA10104-DPB10101 DPA10104-DPB11501 DPA10105-DPB10101 DPA10105-DPB10401 DPA10105-DPB15001 DPA10106-DPB10101 DPA10201-DPB10101 DPA10201-DPB110601 DPA10201-DPB11501 DPA10201-DPB11601 DPA10201-DPB11901 DPA10202-DPB10101 DPA10202-DPB10201 DPA10202-DPB10202 DPA10202-DPB10401 DPA10202-DPB110601 DPA10202-DPB11901 DPA10202-DPB13101 DPA10202-DPB16501 DPA10301-DPB10101 DPA10301-DPB10201 DPA10301-DPB10202 DPA10301-DPB10401 DPA10301-DPB10402 DPA10301-DPB110501 DPA10301-DPB110601 DPA10301-DPB11801 DPA10301-DPB12301 DPA10301-DPB13901 DPA10301-DPB14001 DPA10301-DPB14901 DPA10301-DPB15501 DPA10301-DPB16501 DPA10301-DPB17501 DPA10301-DPB18001 DPA10401-DPB10101 DPA10401-DPB10201; note = HLAs: DPA10401-DPB10202 DPA10401-DPB10402 DPA10401-DPB10501 DPA10401-DPB110501 DPA10401-DPB14901
PPFLWDGFELVPDK

SEQ ID NO: 6373 - protein, 14 aa, synthetic construct
  source 1..14: note = Seed: PPFLWMGYELHPDK; note = HLAs: DPA10103-DPB10101 DPA10103-DPB10201 DPA10103-DPB10202 DPA10103-DPB10401 DPA10103-DPB112601 DPA10103-DPB11501 DPA10103-DPB11601 DPA10103-DPB11901 DPA10103-DPB12301 DPA10103-DPB13101 DPA10103-DPB13401 DPA10103-DPB13901 DPA10103-DPB14001 DPA10103-DPB14101 DPA10103-DPB14801 DPA10103-DPB15001 DPA10103-DPB15901 DPA10104-DPB10101 DPA10104-DPB11501 DPA10105-DPB10101 DPA10105-DPB10401 DPA10105-DPB15001 DPA10106-DPB10101 DPA10201-DPB10101 DPA10201-DPB110601 DPA10201-DPB11501 DPA10201-DPB11601 DPA10201-DPB11901 DPA10202-DPB10101 DPA10202-DPB10201 DPA10202-DPB10202 DPA10202-DPB10401 DPA10202-DPB110601 DPA10202-DPB11901 DPA10202-DPB13101 DPA10202-DPB16501 DPA10301-DPB10101 DPA10301-DPB10201 DPA10301-DPB10202 DPA10301-DPB10401 DPA10301-DPB10402 DPA10301-DPB110501 DPA10301-DPB110601 DPA10301-DPB11801 DPA10301-DPB12301 DPA10301-DPB13901 DPA10301-DPB14001 DPA10301-DPB14901 DPA10301-DPB16501 DPA10301-DPB17501 DPA10301-DPB18001 DPA10401-DPB10101 DPA10401-DPB10201 DPA10401-DPB10202; note = HLAs: DPA10401-DPB10402 DPA10401-DPB10501 DPA10401-DPB110501 DPA10401-DPB14901
PPLLWHGFELLPDK

SEQ ID NO: 6374 - protein, 14 aa, synthetic construct
  source 1..14: note = Seed: PPFLWMGYELHPDK; note = HLAs: DPA10103-DPB10101 DPA10103-DPB10201 DPA10103-DPB10202 DPA10103-DPB10401 DPA10103-DPB112601 DPA10103-DPB11501 DPA10103-DPB11601 DPA10103-DPB11901 DPA10103-DPB12301 DPA10103-DPB13101 DPA10103-DPB13401 DPA10103-DPB13901 DPA10103-DPB14001 DPA10103-DPB14101 DPA10103-DPB14801 DPA10103-DPB15001 DPA10103-DPB15901 DPA10104-DPB10101 DPA10104-DPB11501 DPA10105-DPB10101 DPA10105-DPB10401 DPA10105-DPB15001 DPA10106-DPB10101 DPA10201-DPB10101 DPA10201-DPB110601 DPA10201-DPB11501 DPA10201-DPB11601 DPA10201-DPB11901 DPA10202-DPB10101 DPA10202-DPB10201 DPA10202-DPB10202 DPA10202-DPB10401 DPA10202-DPB110601 DPA10202-DPB11901 DPA10202-DPB13101 DPA10202-DPB16501 DPA10301-DPB10101 DPA10301-DPB10201 DPA10301-DPB10202 DPA10301-DPB10401 DPA10301-DPB10402 DPA10301-DPB110501 DPA10301-DPB110601 DPA10301-DPB11801 DPA10301-DPB12301 DPA10301-DPB13901 DPA10301-DPB14001 DPA10301-DPB14901 DPA10301-DPB15501 DPA10301-DPB16501 DPA10301-DPB17501 DPA10301-DPB18001 DPA10401-DPB10101 DPA10401-DPB10201; note = HLAs: DPA10401-DPB10202 DPA10401-DPB10402 DPA10401-DPB10501 DPA10401-DPB110501 DPA10401-DPB14901
PPFLWEGFELYPDK

SEQ ID NO: 6375 - protein, 14 aa, synthetic construct
  source 1..14: note = Seed: PPFLWMGYELHPDK; note = HLAs: DPA10103-DPB10101 DPA10103-DPB10201 DPA10103-DPB10202 DPA10103-DPB10401 DPA10103-DPB112601 DPA10103-DPB11501 DPA10103-DPB11601 DPA10103-DPB11901 DPA10103-DPB12301 DPA10103-DPB13101 DPA10103-DPB13401 DPA10103-DPB13901 DPA10103-DPB14001 DPA10103-DPB14101 DPA10103-DPB14801 DPA10103-DPB15001 DPA10103-DPB15901 DPA10104-DPB10101 DPA10104-DPB11501 DPA10105-DPB10101 DPA10105-DPB10401 DPA10105-DPB15001 DPA10106-DPB10101 DPA10201-DPB10101 DPA10201-DPB110601 DPA10201-DPB11501 DPA10201-DPB11601 DPA10201-DPB11901 DPA10202-DPB10101 DPA10202-DPB10201 DPA10202-DPB10202 DPA10202-DPB10401 DPA10202-DPB110601 DPA10202-DPB11901 DPA10202-DPB13101 DPA10202-DPB16501 DPA10301-DPB10101 DPA10301-DPB10201 DPA10301-DPB10202 DPA10301-DPB10401 DPA10301-DPB10402 DPA10301-DPB110501 DPA10301-DPB110601 DPA10301-DPB11801 DPA10301-DPB12301 DPA10301-DPB13901 DPA10301-DPB14001 DPA10301-DPB14901 DPA10301-DPB15501 DPA10301-DPB16501 DPA10301-DPB17501 DPA10301-DPB18001 DPA10401-DPB10101 DPA10401-DPB10201; note = HLAs: DPA10401-DPB10202 DPA10401-DPB10402 DPA10401-DPB10501 DPA10401-DPB110501 DPA10401-DPB14901
PPFLWFGFELIPDK

SEQ ID NO: 6376 - protein, 14 aa, synthetic construct
  source 1..14: note = Seed: PPFLWMGYELHPDK; note = HLAs: DPA10103-DPB10101 DPA10103-DPB10201 DPA10103-DPB10202 DPA10103-DPB10401 DPA10103-DPB112601 DPA10103-DPB11501 DPA10103-DPB11601 DPA10103-DPB11901 DPA10103-DPB12301 DPA10103-DPB13101 DPA10103-DPB13401 DPA10103-DPB13901 DPA10103-DPB14001 DPA10103-DPB14101 DPA10103-DPB14801 DPA10103-DPB15001 DPA10103-DPB15901 DPA10104-DPB10101 DPA10104-DPB11501 DPA10105-DPB10101 DPA10105-DPB10401 DPA10105-DPB15001 DPA10106-DPB10101 DPA10201-DPB10101 DPA10201-DPB110601 DPA10201-DPB11501 DPA10201-DPB11601 DPA10201-DPB11901 DPA10202-DPB10101 DPA10202-DPB10201 DPA10202-DPB10202 DPA10202-DPB10401 DPA10202-DPB110601 DPA10202-DPB11901 DPA10202-DPB13101 DPA10202-DPB16501 DPA10301-DPB10101 DPA10301-DPB10201 DPA10301-DPB10202 DPA10301-DPB10401 DPA10301-DPB10402 DPA10301-DPB110501 DPA10301-DPB110601 DPA10301-DPB11801 DPA10301-DPB12301 DPA10301-DPB13901 DPA10301-DPB14001 DPA10301-DPB14901 DPA10301-DPB15501 DPA10301-DPB16501 DPA10301-DPB17501 DPA10301-DPB18001 DPA10401-DPB10101 DPA10401-DPB10201; note = HLAs: DPA10401-DPB10202 DPA10401-DPB10402 DPA10401-DPB10501 DPA10401-DPB110501 DPA10401-DPB14901
PPFLWTGYELFPDK

SEQ ID NO: 6377 - protein, 14 aa, synthetic construct
  source 1..14: note = Seed: PPFLWMGYELHPDK; note = HLAs: DRB1_1001 DPA10103-DPB10101 DPA10103-DPB10201 DPA10103-DPB10202 DPA10103-DPB10401 DPA10103-DPB112601 DPA10103-DPB11501 DPA10103-DPB11601 DPA10103-DPB11901 DPA10103-DPB12301 DPA10103-DPB13101 DPA10103-DPB13401 DPA10103-DPB13901 DPA10103-DPB14001 DPA10103-DPB14101 DPA10103-DPB14801 DPA10103-DPB15001 DPA10103-DPB15901 DPA10104-DPB10101 DPA10104-DPB11501 DPA10105-DPB10101 DPA10105-DPB10401 DPA10105-DPB15001 DPA10106-DPB10101 DPA10201-DPB10101 DPA10201-DPB110601 DPA10201-DPB11501 DPA10201-DPB11601 DPA10201-DPB11901 DPA10202-DPB10101 DPA10202-DPB10201 DPA10202-DPB10202 DPA10202-DPB10401 DPA10202-DPB110601 DPA10202-DPB11901 DPA10202-DPB13101 DPA10202-DPB16501 DPA10301-DPB10101 DPA10301-DPB10201 DPA10301-DPB10202 DPA10301-DPB10401 DPA10301-DPB10402 DPA10301-DPB110501 DPA10301-DPB110601 DPA10301-DPB11801 DPA10301-DPB12301 DPA10301-DPB13901 DPA10301-DPB14001 DPA10301-DPB14901 DPA10301-DPB15501 DPA10301-DPB16501 DPA10301-DPB17501 DPA10301-DPB18001 DPA10401-DPB10101 DPA10401-DPB10201; note = HLAs: DPA10401-DPB10202 DPA10401-DPB10402 DPA10401-DPB10501 DPA10401-DPB110501 DPA10401-DPB14901
PPFLWVGFELSPDK

SEQ ID NO: 6378 - protein, 14 aa, synthetic construct
  source 1..14: note = Seed: PPFLWMGYELHPDK; note = HLAs: DPA10103-DPB10101 DPA10103-DPB10201 DPA10103-DPB10202 DPA10103-DPB10401 DPA10103-DPB112601 DPA10103-DPB11501 DPA10103-DPB11601 DPA10103-DPB11901 DPA10103-DPB12301 DPA10103-DPB13101 DPA10103-DPB13401 DPA10103-DPB13901 DPA10103-DPB14001 DPA10103-DPB14101 DPA10103-DPB14801 DPA10103-DPB15001 DPA10103-DPB15901 DPA10104-DPB10101 DPA10104-DPB11501 DPA10105-DPB10101 DPA10105-DPB10401 DPA10105-DPB15001 DPA10106-DPB10101 DPA10201-DPB10101 DPA10201-DPB110601 DPA10201-DPB11501 DPA10201-DPB11601 DPA10201-DPB11901 DPA10202-DPB10101 DPA10202-DPB10201 DPA10202-DPB10202 DPA10202-DPB10401 DPA10202-DPB110601 DPA10202-DPB11901 DPA10202-DPB13101 DPA10202-DPB16501 DPA10301-DPB10101 DPA10301-DPB10201 DPA10301-DPB10202 DPA10301-DPB10401 DPA10301-DPB10402 DPA10301-DPB110501 DPA10301-DPB110601 DPA10301-DPB11801 DPA10301-DPB12301 DPA10301-DPB13901 DPA10301-DPB14001 DPA10301-DPB14901 DPA10301-DPB15501 DPA10301-DPB16501 DPA10301-DPB17501 DPA10301-DPB18001 DPA10401-DPB10101 DPA10401-DPB10201; note = HLAs: DPA10401-DPB10202 DPA10401-DPB10402 DPA10401-DPB10501 DPA10401-DPB110501 DPA10401-DPB14901
PPWLWHGFELLPDK

SEQ ID NO: 6379 - protein, 20 aa, synthetic construct
  source 1..20: note = Seed: KEPPFLWMGYELHPDKWTVQ; note = HLAs: DRB1_0101 DPA10103-DPB10101 DPA10103-DPB10201 DPA10103-DPB10202 DPA10103-DPB10401 DPA10103-DPB10402 DPA10103-DPB10501 DPA10103-DPB110501 DPA10103-DPB112601 DPA10103-DPB11501 DPA10103-DPB11601 DPA10103-DPB11801 DPA10103-DPB11901 DPA10103-DPB12301 DPA10103-DPB13101 DPA10103-DPB13401 DPA10103-DPB13901 DPA10103-DPB14001 DPA10103-DPB14101 DPA10103-DPB14801 DPA10103-DPB14901 DPA10103-DPB15001 DPA10103-DPB15101 DPA10103-DPB15501 DPA10103-DPB15901 DPA10103-DPB18001 DPA10104-DPB10101 DPA10104-DPB11501 DPA10105-DPB10101 DPA10105-DPB10401 DPA10105-DPB11801 DPA10105-DPB15001 DPA10106-DPB10101 DPA10201-DPB10101 DPA10201-DPB10201 DPA10201-DPB10202 DPA10201-DPB10401 DPA10201-DPB10501 DPA10201-DPB110601 DPA10201-DPB11501 DPA10201-DPB11601 DPA10201-DPB11901 DPA10201-DPB13401 DPA10201-DPB15501 DPA10202-DPB10101 DPA10202-DPB10201 DPA10202-DPB10202 DPA10202-DPB10401 DPA10202-DPB10501 DPA10202-DPB110601 DPA10202-DPB11101 DPA10202-DPB11301 DPA10202-DPB11801 DPA10202-DPB11901 DPA10202-DPB13101; note = HLAs: DPA10202-DPB13801 DPA10202-DPB15501 DPA10202-DPB16501 DPA10301-DPB10101 DPA10301-DPB10201 DPA10301-DPB10202 DPA10301-DPB10401 DPA10301-DPB10402 DPA10301-DPB110501 DPA10301-DPB110601 DPA10301-DPB11101 DPA10301-DPB11301 DPA10301-DPB11801 DPA10301-DPB12301 DPA10301-DPB13901 DPA10301-DPB14001 DPA10301-DPB14901 DPA10301-DPB15501 DPA10301-DPB16501 DPA10301-DPB17501 DPA10301-DPB18001 DPA10401-DPB10101 DPA10401-DPB10201 DPA10401-DPB10202 DPA10401-DPB10402 DPA10401-DPB10501 DPA10401-DPB110501 DPA10401-DPB14901
KEPPYLWEGFELIPDKWTVQ

SEQ ID NO: 6380 - protein, 14 aa, synthetic construct
  source 1..14: note = Seed: PPFLWMGYELHPDK; note = HLAs: DRB1_1001 DPA10103-DPB10101 DPA10103-DPB10201 DPA10103-DPB10202 DPA10103-DPB10401 DPA10103-DPB112601 DPA10103-DPB11501 DPA10103-DPB11601 DPA10103-DPB11901 DPA10103-DPB12301 DPA10103-DPB13101 DPA10103-DPB13401 DPA10103-DPB13901 DPA10103-DPB14001 DPA10103-DPB14101 DPA10103-DPB14801 DPA10103-DPB15001 DPA10103-DPB15901 DPA10104-DPB10101 DPA10104-DPB11501 DPA10105-DPB10101 DPA10105-DPB10401 DPA10105-DPB15001 DPA10106-DPB10101 DPA10201-DPB10101 DPA10201-DPB110601 DPA10201-DPB11501 DPA10201-DPB11601 DPA10201-DPB11901 DPA10202-DPB10101 DPA10202-DPB10201 DPA10202-DPB10202 DPA10202-DPB10401 DPA10202-DPB110601 DPA10202-DPB11901 DPA10202-DPB13101 DPA10202-DPB16501 DPA10301-DPB10101 DPA10301-DPB10201 DPA10301-DPB10202 DPA10301-DPB10401 DPA10301-DPB10402 DPA10301-DPB110501 DPA10301-DPB110601 DPA10301-DPB11801 DPA10301-DPB12301 DPA10301-DPB13901 DPA10301-DPB14001 DPA10301-DPB14901 DPA10301-DPB15501 DPA10301-DPB16501 DPA10301-DPB17501 DPA10301-DPB18001 DPA10401-DPB10101 DPA10401-DPB10201; note = HLAs: DPA10401-DPB10202 DPA10401-DPB10402 DPA10401-DPB10501 DPA10401-DPB110501 DPA10401-DPB14901
PPWLWAGFELLPDK

SEQ ID NO: 6381 - protein, 14 aa, synthetic construct
  source 1..14: note = Seed: PPFLWMGYELHPDK; note = HLAs: DPA10103-DPB10101 DPA10103-DPB10201 DPA10103-DPB10202 DPA10103-DPB10401 DPA10103-DPB112601 DPA10103-DPB11501 DPA10103-DPB11601 DPA10103-DPB11901 DPA10103-DPB12301 DPA10103-DPB13101 DPA10103-DPB13401 DPA10103-DPB13901 DPA10103-DPB14001 DPA10103-DPB14101 DPA10103-DPB14801 DPA10103-DPB15001 DPA10103-DPB15901 DPA10104-DPB10101 DPA10104-DPB11501 DPA10105-DPB10101 DPA10105-DPB10401 DPA10105-DPB15001 DPA10106-DPB10101 DPA10201-DPB10101 DPA10201-DPB110601 DPA10201-DPB11501 DPA10201-DPB11601 DPA10201-DPB11901 DPA10202-DPB10101 DPA10202-DPB10201 DPA10202-DPB10202 DPA10202-DPB10401 DPA10202-DPB110601 DPA10202-DPB11901 DPA10202-DPB13101 DPA10202-DPB16501 DPA10301-DPB10101 DPA10301-DPB10201 DPA10301-DPB10202 DPA10301-DPB10401 DPA10301-DPB10402 DPA10301-DPB110501 DPA10301-DPB110601 DPA10301-DPB11801 DPA10301-DPB12301 DPA10301-DPB13901 DPA10301-DPB14001 DPA10301-DPB14901 DPA10301-DPB15501 DPA10301-DPB16501 DPA10301-DPB17501 DPA10301-DPB18001 DPA10401-DPB10101 DPA10401-DPB10201; note = HLAs: DPA10401-DPB10202 DPA10401-DPB10402 DPA10401-DPB10501 DPA10401-DPB110501 DPA10401-DPB14901
PPFLWTGYELMPDK

SEQ ID NO: 6382 - protein, 14 aa, synthetic construct
  source 1..14: note = Seed: PPFLWMGYELHPDK; note = HLAs: DPA10103-DPB10101 DPA10103-DPB10201 DPA10103-DPB10202 DPA10103-DPB10401 DPA10103-DPB112601 DPA10103-DPB11501 DPA10103-DPB11601 DPA10103-DPB11901 DPA10103-DPB12301 DPA10103-DPB13101 DPA10103-DPB13401 DPA10103-DPB13901 DPA10103-DPB14001 DPA10103-DPB14101 DPA10103-DPB14801 DPA10103-DPB15001 DPA10103-DPB15901 DPA10104-DPB10101 DPA10104-DPB11501 DPA10105-DPB10101 DPA10105-DPB10401 DPA10105-DPB15001 DPA10106-DPB10101 DPA10201-DPB10101 DPA10201-DPB110601 DPA10201-DPB11501 DPA10201-DPB11601 DPA10201-DPB11901 DPA10202-DPB10101 DPA10202-DPB10201 DPA10202-DPB10202 DPA10202-DPB10401 DPA10202-DPB110601 DPA10202-DPB11901 DPA10202-DPB13101 DPA10202-DPB16501 DPA10301-DPB10101 DPA10301-DPB10201 DPA10301-DPB10202 DPA10301-DPB10401 DPA10301-DPB10402 DPA10301-DPB110501 DPA10301-DPB110601 DPA10301-DPB11801 DPA10301-DPB12301 DPA10301-DPB13901 DPA10301-DPB14001 DPA10301-DPB14901 DPA10301-DPB15501 DPA10301-DPB16501 DPA10301-DPB17501 DPA10301-DPB18001 DPA10401-DPB10101 DPA10401-DPB10201; note = HLAs: DPA10401-DPB10202 DPA10401-DPB10402 DPA10401-DPB10501 DPA10401-DPB110501 DPA10401-DPB14901
PPFLWDGFELLPDK

SEQ ID NO: 6383 - protein, 20 aa, synthetic construct
  source 1..20: note = Seed: KEPPFLWMGYELHPDKWTVQ; note = HLAs: DRB1_0101 DPA10103-DPB10101 DPA10103-DPB10201 DPA10103-DPB10202 DPA10103-DPB10401 DPA10103-DPB10402 DPA10103-DPB10501 DPA10103-DPB110501 DPA10103-DPB112601 DPA10103-DPB11501 DPA10103-DPB11601 DPA10103-DPB11801 DPA10103-DPB11901 DPA10103-DPB12301 DPA10103-DPB13101 DPA10103-DPB13401 DPA10103-DPB13901 DPA10103-DPB14001 DPA10103-DPB14101 DPA10103-DPB14801 DPA10103-DPB14901 DPA10103-DPB15001 DPA10103-DPB15101 DPA10103-DPB15501 DPA10103-DPB15901 DPA10103-DPB18001 DPA10104-DPB10101 DPA10104-DPB11501 DPA10105-DPB10101 DPA10105-DPB10401 DPA10105-DPB11801 DPA10105-DPB15001 DPA10106-DPB10101 DPA10201-DPB10101 DPA10201-DPB10201 DPA10201-DPB10202 DPA10201-DPB10401 DPA10201-DPB10501 DPA10201-DPB110601 DPA10201-DPB11501 DPA10201-DPB11601 DPA10201-DPB11901 DPA10201-DPB13401 DPA10201-DPB15501 DPA10202-DPB10101 DPA10202-DPB10201 DPA10202-DPB10202 DPA10202-DPB10401 DPA10202-DPB10501 DPA10202-DPB110601 DPA10202-DPB11101 DPA10202-DPB11301 DPA10202-DPB11801 DPA10202-DPB11901 DPA10202-DPB13101; note = HLAs: DPA10202-DPB13801 DPA10202-DPB15501 DPA10202-DPB16501 DPA10301-DPB10101 DPA10301-DPB10201 DPA10301-DPB10202 DPA10301-DPB10401 DPA10301-DPB10402 DPA10301-DPB110501 DPA10301-DPB110601 DPA10301-DPB11101 DPA10301-DPB11301 DPA10301-DPB11801 DPA10301-DPB12301 DPA10301-DPB13901 DPA10301-DPB14001 DPA10301-DPB14901 DPA10301-DPB15501 DPA10301-DPB16501 DPA10301-DPB17501 DPA10301-DPB18001 DPA10401-DPB10101 DPA10401-DPB10201 DPA10401-DPB10202 DPA10401-DPB10402 DPA10401-DPB10501 DPA10401-DPB110501 DPA10401-DPB14901
KEPPYLWEGFELLPDKWTVQ

SEQ ID NO: 6384 - protein, 20 aa, synthetic construct
  source 1..20: note = Seed: KEPPFLWMGYELHPDKWTVQ; note = HLAs: DQA10102-DQB10501
KEPPFLMMGLEMHPFKWTVQ

SEQ ID NO: 6385 - protein, 14 aa, synthetic construct
  source 1..14: note = Seed: PPFLWMGYELHPDK; note = HLAs: DPA10103-DPB10101 DPA10103-DPB10201 DPA10103-DPB10202 DPA10103-DPB10401 DPA10103-DPB112601 DPA10103-DPB11501 DPA10103-DPB11601 DPA10103-DPB11901 DPA10103-DPB12301 DPA10103-DPB13101 DPA10103-DPB13401 DPA10103-DPB13901 DPA10103-DPB14001 DPA10103-DPB14101 DPA10103-DPB14801 DPA10103-DPB15001 DPA10103-DPB15901 DPA10104-DPB10101 DPA10104-DPB11501 DPA10105-DPB10101 DPA10105-DPB10401 DPA10105-DPB15001 DPA10106-DPB10101 DPA10201-DPB10101 DPA10201-DPB110601 DPA10201-DPB11501 DPA10201-DPB11601 DPA10201-DPB11901 DPA10202-DPB10101 DPA10202-DPB10201 DPA10202-DPB10202 DPA10202-DPB10401 DPA10202-DPB110601 DPA10202-DPB11901 DPA10202-DPB13101 DPA10202-DPB16501 DPA10301-DPB10101 DPA10301-DPB10201 DPA10301-DPB10202 DPA10301-DPB10401 DPA10301-DPB10402 DPA10301-DPB110501 DPA10301-DPB110601 DPA10301-DPB11801 DPA10301-DPB12301 DPA10301-DPB13901 DPA10301-DPB14001 DPA10301-DPB14901 DPA10301-DPB15501 DPA10301-DPB16501 DPA10301-DPB17501 DPA10301-DPB18001 DPA10401-DPB10101 DPA10401-DPB10201; note = HLAs: DPA10401-DPB10202 DPA10401-DPB10402 DPA10401-DPB10501 DPA10401-DPB110501 DPA10401-DPB14901
PPILWTGFELMPDK

SEQ ID NO: 6386 - protein, 20 aa, synthetic construct
  source 1..20: note = Seed: KEPPFLWMGYELHPDKWTVQ; note = HLAs: DRB1_0101 DPA10103-DPB10101 DPA10103-DPB10201 DPA10103-DPB10202 DPA10103-DPB10401 DPA10103-DPB10402 DPA10103-DPB10501 DPA10103-DPB110501 DPA10103-DPB112601 DPA10103-DPB11501 DPA10103-DPB11601 DPA10103-DPB11801 DPA10103-DPB11901 DPA10103-DPB12301 DPA10103-DPB13101 DPA10103-DPB13401 DPA10103-DPB13901 DPA10103-DPB14001 DPA10103-DPB14101 DPA10103-DPB14801 DPA10103-DPB14901 DPA10103-DPB15001 DPA10103-DPB15101 DPA10103-DPB15501 DPA10103-DPB15901 DPA10103-DPB18001 DPA10104-DPB10101 DPA10104-DPB11501 DPA10105-DPB10101 DPA10105-DPB10401 DPA10105-DPB11801 DPA10105-DPB15001 DPA10106-DPB10101 DPA10201-DPB10101 DPA10201-DPB10201 DPA10201-DPB10202 DPA10201-DPB10401 DPA10201-DPB10501 DPA10201-DPB110601 DPA10201-DPB11501 DPA10201-DPB11601 DPA10201-DPB11901 DPA10201-DPB13401 DPA10201-DPB15501 DPA10202-DPB10101 DPA10202-DPB10201 DPA10202-DPB10202 DPA10202-DPB10401 DPA10202-DPB10501 DPA10202-DPB110601 DPA10202-DPB11101 DPA10202-DPB11301 DPA10202-DPB11801 DPA10202-DPB11901 DPA10202-DPB13101; note = HLAs: DPA10202-DPB13801 DPA10202-DPB15501 DPA10202-DPB16501 DPA10301-DPB10101 DPA10301-DPB10201 DPA10301-DPB10202 DPA10301-DPB10401 DPA10301-DPB10402 DPA10301-DPB110501 DPA10301-DPB110601 DPA10301-DPB11101 DPA10301-DPB11301 DPA10301-DPB11801 DPA10301-DPB12301 DPA10301-DPB13901 DPA10301-DPB14001 DPA10301-DPB14901 DPA10301-DPB15501 DPA10301-DPB16501 DPA10301-DPB17501 DPA10301-DPB18001 DPA10401-DPB10101 DPA10401-DPB10201 DPA10401-DPB10202 DPA10401-DPB10402 DPA10401-DPB10501 DPA10401-DPB110501 DPA10401-DPB14901
KEPPFLWHGFELTPDKWTVQ

SEQ ID NO: 6387 - protein, 14 aa, synthetic construct
  source 1..14: note = Seed: PPFLWMGYELHPDK; note = HLAs: DRB1_1001 DPA10103-DPB10101 DPA10103-DPB10201 DPA10103-DPB10202 DPA10103-DPB10401 DPA10103-DPB112601 DPA10103-DPB11501 DPA10103-DPB11601 DPA10103-DPB11901 DPA10103-DPB12301 DPA10103-DPB13101 DPA10103-DPB13401 DPA10103-DPB13901 DPA10103-DPB14001 DPA10103-DPB14101 DPA10103-DPB14801 DPA10103-DPB15001 DPA10103-DPB15901 DPA10104-DPB10101 DPA10104-DPB11501 DPA10105-DPB10101 DPA10105-DPB10401 DPA10105-DPB15001 DPA10106-DPB10101 DPA10201-DPB10101 DPA10201-DPB110601 DPA10201-DPB11501 DPA10201-DPB11601 DPA10201-DPB11901 DPA10202-DPB10101 DPA10202-DPB10201 DPA10202-DPB10202 DPA10202-DPB10401 DPA10202-DPB110601 DPA10202-DPB11901 DPA10202-DPB13101 DPA10202-DPB16501 DPA10301-DPB10101 DPA10301-DPB10201 DPA10301-DPB10202 DPA10301-DPB10401 DPA10301-DPB10402 DPA10301-DPB110501 DPA10301-DPB110601 DPA10301-DPB11801 DPA10301-DPB12301 DPA10301-DPB13901 DPA10301-DPB14001 DPA10301-DPB14901 DPA10301-DPB15501 DPA10301-DPB16501 DPA10301-DPB17501 DPA10301-DPB18001 DPA10401-DPB10101 DPA10401-DPB10201; note = HLAs: DPA10401-DPB10202 DPA10401-DPB10402 DPA10401-DPB10501 DPA10401-DPB110501 DPA10401-DPB14901
PPFLWAGFELNPDK

SEQ ID NO: 6388 - protein, 14 aa, synthetic construct
  source 1..14: note = Seed: PPFLWMGYELHPDK; note = HLAs: DPA10103-DPB10101 DPA10103-DPB10201 DPA10103-DPB10202 DPA10103-DPB10401 DPA10103-DPB112601 DPA10103-DPB11501 DPA10103-DPB11601 DPA10103-DPB11901 DPA10103-DPB12301 DPA10103-DPB13101 DPA10103-DPB13401 DPA10103-DPB13901 DPA10103-DPB14001 DPA10103-DPB14101 DPA10103-DPB14801 DPA10103-DPB15001 DPA10103-DPB15901 DPA10104-DPB10101 DPA10104-DPB11501 DPA10105-DPB10101 DPA10105-DPB10401 DPA10105-DPB15001 DPA10106-DPB10101 DPA10201-DPB10101 DPA10201-DPB110601 DPA10201-DPB11501 DPA10201-DPB11601 DPA10201-DPB11901 DPA10202-DPB10101 DPA10202-DPB10201 DPA10202-DPB10202 DPA10202-DPB10401 DPA10202-DPB110601 DPA10202-DPB11901 DPA10202-DPB13101 DPA10202-DPB16501 DPA10301-DPB10101 DPA10301-DPB10201 DPA10301-DPB10202 DPA10301-DPB10401 DPA10301-DPB10402 DPA10301-DPB110501 DPA10301-DPB110601 DPA10301-DPB11801 DPA10301-DPB12301 DPA10301-DPB13901 DPA10301-DPB14001 DPA10301-DPB14901 DPA10301-DPB15501 DPA10301-DPB16501 DPA10301-DPB17501 DPA10301-DPB18001 DPA10401-DPB10101 DPA10401-DPB10201; note = HLAs: DPA10401-DPB10202 DPA10401-DPB10402 DPA10401-DPB10501 DPA10401-DPB110501 DPA10401-DPB14901
PPMLWSGFELIPDK

SEQ ID NO: 6389 - protein, 14 aa, synthetic construct
  source 1..14: note = Seed: PPFLWMGYELHPDK; note = HLAs: DPA10103-DPB10101 DPA10103-DPB10201 DPA10103-DPB10202 DPA10103-DPB10401 DPA10103-DPB112601 DPA10103-DPB11501 DPA10103-DPB11601 DPA10103-DPB11901 DPA10103-DPB12301 DPA10103-DPB13101 DPA10103-DPB13401 DPA10103-DPB13901 DPA10103-DPB14001 DPA10103-DPB14101 DPA10103-DPB14801 DPA10103-DPB15001 DPA10103-DPB15901 DPA10104-DPB10101 DPA10104-DPB11501 DPA10105-DPB10101 DPA10105-DPB10401 DPA10105-DPB15001 DPA10106-DPB10101 DPA10201-DPB10101 DPA10201-DPB110601 DPA10201-DPB11501 DPA10201-DPB11601 DPA10201-DPB11901 DPA10202-DPB10101 DPA10202-DPB10201 DPA10202-DPB10202 DPA10202-DPB10401 DPA10202-DPB110601 DPA10202-DPB11901 DPA10202-DPB13101 DPA10202-DPB16501 DPA10301-DPB10101 DPA10301-DPB10201 DPA10301-DPB10202 DPA10301-DPB10401 DPA10301-DPB10402 DPA10301-DPB110501 DPA10301-DPB110601 DPA10301-DPB11801 DPA10301-DPB12301 DPA10301-DPB13901 DPA10301-DPB14001 DPA10301-DPB14901 DPA10301-DPB15501 DPA10301-DPB16501 DPA10301-DPB17501 DPA10301-DPB18001 DPA10401-DPB10101 DPA10401-DPB10201; note = HLAs: DPA10401-DPB10202 DPA10401-DPB10402 DPA10401-DPB10501 DPA10401-DPB110501 DPA10401-DPB14901
PPFLWTGLELIPDK

SEQ ID NO: 6390 - protein, 14 aa, synthetic construct
  source 1..14: note = Seed: PPFLWMGYELHPDK; note = HLAs: DPA10103-DPB10101 DPA10103-DPB10201 DPA10103-DPB10202 DPA10103-DPB10401 DPA10103-DPB112601 DPA10103-DPB11501 DPA10103-DPB11601 DPA10103-DPB11901 DPA10103-DPB12301 DPA10103-DPB13101 DPA10103-DPB13401 DPA10103-DPB13901 DPA10103-DPB14001 DPA10103-DPB14101 DPA10103-DPB14801 DPA10103-DPB15001 DPA10103-DPB15901 DPA10104-DPB10101 DPA10104-DPB11501 DPA10105-DPB10101 DPA10105-DPB10401 DPA10105-DPB15001 DPA10106-DPB10101 DPA10201-DPB10101 DPA10201-DPB110601 DPA10201-DPB11501 DPA10201-DPB11601 DPA10201-DPB11901 DPA10202-DPB10101 DPA10202-DPB10201 DPA10202-DPB10202 DPA10202-DPB10401 DPA10202-DPB110601 DPA10202-DPB11901 DPA10202-DPB13101 DPA10202-DPB16501 DPA10301-DPB10101 DPA10301-DPB10201 DPA10301-DPB10202 DPA10301-DPB10401 DPA10301-DPB10402 DPA10301-DPB110501 DPA10301-DPB110601 DPA10301-DPB11801 DPA10301-DPB12301 DPA10301-DPB13901 DPA10301-DPB14001 DPA10301-DPB14901 DPA10301-DPB15501 DPA10301-DPB16501 DPA10301-DPB17501 DPA10301-DPB18001 DPA10401-DPB10101 DPA10401-DPB10201; note = HLAs: DPA10401-DPB10202 DPA10401-DPB10402 DPA10401-DPB10501 DPA10401-DPB110501 DPA10401-DPB14901
PPLLWTGFELAPDK

SEQ ID NO: 6391 - protein, 14 aa, synthetic construct
  source 1..14: note = Seed: PPFLWMGYELHPDK; note = HLAs: DPA10103-DPB10101 DPA10103-DPB10201 DPA10103-DPB10202 DPA10103-DPB10401 DPA10103-DPB112601 DPA10103-DPB11501 DPA10103-DPB11601 DPA10103-DPB11901 DPA10103-DPB12301 DPA10103-DPB13101 DPA10103-DPB13401 DPA10103-DPB13901 DPA10103-DPB14001 DPA10103-DPB14101 DPA10103-DPB14801 DPA10103-DPB15001 DPA10103-DPB15901 DPA10104-DPB10101 DPA10104-DPB11501 DPA10105-DPB10101 DPA10105-DPB10401 DPA10105-DPB15001 DPA10106-DPB10101 DPA10201-DPB10101 DPA10201-DPB110601 DPA10201-DPB11501 DPA10201-DPB11601 DPA10201-DPB11901 DPA10202-DPB10101 DPA10202-DPB10201 DPA10202-DPB10202 DPA10202-DPB10401 DPA10202-DPB110601 DPA10202-DPB11901 DPA10202-DPB13101 DPA10202-DPB16501 DPA10301-DPB10101 DPA10301-DPB10201 DPA10301-DPB10202 DPA10301-DPB10401 DPA10301-DPB10402 DPA10301-DPB110501 DPA10301-DPB110601 DPA10301-DPB11801 DPA10301-DPB12301 DPA10301-DPB13901 DPA10301-DPB14001 DPA10301-DPB14901 DPA10301-DPB15501 DPA10301-DPB16501 DPA10301-DPB17501 DPA10301-DPB18001 DPA10401-DPB10101 DPA10401-DPB10201; note = HLAs: DPA10401-DPB10202 DPA10401-DPB10402 DPA10401-DPB10501 DPA10401-DPB110501 DPA10401-DPB14901
PPFLWSGLELLPDK

SEQ ID NO: 6392 - protein, 20 aa, synthetic construct
  source 1..20: note = Seed: KEPPFLWMGYELHPDKWTVQ; note = HLAs: DRB1_1001 DPA10103-DPB10101 DPA10103-DPB10201 DPA10103-DPB10202 DPA10103-DPB10401 DPA10103-DPB10402 DPA10103-DPB10501 DPA10103-DPB110501 DPA10103-DPB112601 DPA10103-DPB11501 DPA10103-DPB11601 DPA10103-DPB11801 DPA10103-DPB11901 DPA10103-DPB12301 DPA10103-DPB13101 DPA10103-DPB13401 DPA10103-DPB13901 DPA10103-DPB14001 DPA10103-DPB14101 DPA10103-DPB14801 DPA10103-DPB14901 DPA10103-DPB15001 DPA10103-DPB15101 DPA10103-DPB15501 DPA10103-DPB15901 DPA10103-DPB18001 DPA10104-DPB10101 DPA10104-DPB11501 DPA10105-DPB10101 DPA10105-DPB10401 DPA10105-DPB11801 DPA10105-DPB15001 DPA10106-DPB10101 DPA10201-DPB10101 DPA10201-DPB10201 DPA10201-DPB10202 DPA10201-DPB10401 DPA10201-DPB10501 DPA10201-DPB110601 DPA10201-DPB11501 DPA10201-DPB11601 DPA10201-DPB11901 DPA10201-DPB13401 DPA10201-DPB15501 DPA10202-DPB10101 DPA10202-DPB10201 DPA10202-DPB10202 DPA10202-DPB10401 DPA10202-DPB10501 DPA10202-DPB110601 DPA10202-DPB11101 DPA10202-DPB11301 DPA10202-DPB11801 DPA10202-DPB11901 DPA10202-DPB13101; note = HLAs: DPA10202-DPB13801 DPA10202-DPB15501 DPA10202-DPB16501 DPA10301-DPB10101 DPA10301-DPB10201 DPA10301-DPB10202 DPA10301-DPB10401 DPA10301-DPB10402 DPA10301-DPB110501 DPA10301-DPB110601 DPA10301-DPB11101 DPA10301-DPB11301 DPA10301-DPB11801 DPA10301-DPB12301 DPA10301-DPB13901 DPA10301-DPB14001 DPA10301-DPB14901 DPA10301-DPB15501 DPA10301-DPB16501 DPA10301-DPB17501 DPA10301-DPB18001 DPA10401-DPB10101 DPA10401-DPB10201 DPA10401-DPB10202 DPA10401-DPB10402 DPA10401-DPB10501 DPA10401-DPB110501 DPA10401-DPB14901
KEPPFLWEGFELSPDKWTVQ

SEQ ID NO: 6393 - protein, 14 aa, synthetic construct
  source 1..14: note = Seed: PPFLWMGYELHPDK; note = HLAs: DRB1_1001 DPA10103-DPB10101 DPA10103-DPB10201 DPA10103-DPB10202 DPA10103-DPB10401 DPA10103-DPB112601 DPA10103-DPB11501 DPA10103-DPB11601 DPA10103-DPB11901 DPA10103-DPB12301 DPA10103-DPB13101 DPA10103-DPB13401 DPA10103-DPB13901 DPA10103-DPB14001 DPA10103-DPB14101 DPA10103-DPB14801 DPA10103-DPB15001 DPA10103-DPB15901 DPA10104-DPB10101 DPA10104-DPB11501 DPA10105-DPB10101 DPA10105-DPB10401 DPA10105-DPB15001 DPA10106-DPB10101 DPA10201-DPB10101 DPA10201-DPB110601 DPA10201-DPB11501 DPA10201-DPB11601 DPA10201-DPB11901 DPA10202-DPB10101 DPA10202-DPB10201 DPA10202-DPB10202 DPA10202-DPB10401 DPA10202-DPB110601 DPA10202-DPB11901 DPA10202-DPB13101 DPA10202-DPB16501 DPA10301-DPB10101 DPA10301-DPB10201 DPA10301-DPB10202 DPA10301-DPB10401 DPA10301-DPB10402 DPA10301-DPB110501 DPA10301-DPB110601 DPA10301-DPB11801 DPA10301-DPB12301 DPA10301-DPB13901 DPA10301-DPB14001 DPA10301-DPB14901 DPA10301-DPB15501 DPA10301-DPB16501 DPA10301-DPB17501 DPA10301-DPB18001 DPA10401-DPB10101 DPA10401-DPB10201; note = HLAs: DPA10401-DPB10202 DPA10401-DPB10402 DPA10401-DPB10501 DPA10401-DPB110501 DPA10401-DPB14901
PPFLWIGFELSPDK

SEQ ID NO: 6394 - protein, 20 aa, synthetic construct
  source 1..20: note = Seed: KEPPFLWMGYELHPDKWTVQ; note = HLAs: DPA10103-DPB10101 DPA10103-DPB10201 DPA10103-DPB10202 DPA10103-DPB10401 DPA10103-DPB10402 DPA10103-DPB10501 DPA10103-DPB110501 DPA10103-DPB112601 DPA10103-DPB11501 DPA10103-DPB11601 DPA10103-DPB11801 DPA10103-DPB11901 DPA10103-DPB12301 DPA10103-DPB13101 DPA10103-DPB13401 DPA10103-DPB13901 DPA10103-DPB14001 DPA10103-DPB14101 DPA10103-DPB14801 DPA10103-DPB14901 DPA10103-DPB15001 DPA10103-DPB15101 DPA10103-DPB15501 DPA10103-DPB15901 DPA10103-DPB18001 DPA10104-DPB10101 DPA10104-DPB11501 DPA10105-DPB10101 DPA10105-DPB10401 DPA10105-DPB11801 DPA10105-DPB15001 DPA10106-DPB10101 DPA10201-DPB10101 DPA10201-DPB10201 DPA10201-DPB10202 DPA10201-DPB10401 DPA10201-DPB10501 DPA10201-DPB110601 DPA10201-DPB11501 DPA10201-DPB11601 DPA10201-DPB11901 DPA10201-DPB13401 DPA10201-DPB15501 DPA10202-DPB10101 DPA10202-DPB10201 DPA10202-DPB10202 DPA10202-DPB10401 DPA10202-DPB10501 DPA10202-DPB110601 DPA10202-DPB11101 DPA10202-DPB11301 DPA10202-DPB11801 DPA10202-DPB11901 DPA10202-DPB13101 DPA10202-DPB13801; note = HLAs: DPA10202-DPB15501 DPA10202-DPB16501 DPA10301-DPB10101 DPA10301-DPB10201 DPA10301-DPB10202 DPA10301-DPB10401 DPA10301-DPB10402 DPA10301-DPB110501 DPA10301-DPB110601 DPA10301-DPB11101 DPA10301-DPB11301 DPA10301-DPB11801 DPA10301-DPB12301 DPA10301-DPB13901 DPA10301-DPB14001 DPA10301-DPB14901 DPA10301-DPB15501 DPA10301-DPB16501 DPA10301-DPB17501 DPA10301-DPB18001 DPA10401-DPB10101 DPA10401-DPB10201 DPA10401-DPB10202 DPA10401-DPB10402 DPA10401-DPB10501 DPA10401-DPB110501 DPA10401-DPB14901
KEPPFLWTGFELHPDKWTVQ

SEQ ID NO: 6395 - protein, 14 aa, synthetic construct
  source 1..14: note = Seed: PPFLWMGYELHPDK; note = HLAs: DPA10103-DPB10101 DPA10103-DPB10201 DPA10103-DPB10202 DPA10103-DPB10401 DPA10103-DPB112601 DPA10103-DPB11501 DPA10103-DPB11601 DPA10103-DPB11901 DPA10103-DPB12301 DPA10103-DPB13101 DPA10103-DPB13401 DPA10103-DPB13901 DPA10103-DPB14001 DPA10103-DPB14101 DPA10103-DPB14801 DPA10103-DPB15001 DPA10103-DPB15901 DPA10104-DPB10101 DPA10104-DPB11501 DPA10105-DPB10101 DPA10105-DPB10401 DPA10105-DPB15001 DPA10106-DPB10101 DPA10201-DPB10101 DPA10201-DPB110601 DPA10201-DPB11501 DPA10201-DPB11601 DPA10201-DPB11901 DPA10202-DPB10101 DPA10202-DPB10201 DPA10202-DPB10202 DPA10202-DPB10401 DPA10202-DPB110601 DPA10202-DPB11901 DPA10202-DPB13101 DPA10202-DPB16501 DPA10301-DPB10101 DPA10301-DPB10201 DPA10301-DPB10202 DPA10301-DPB10401 DPA10301-DPB10402 DPA10301-DPB110501 DPA10301-DPB110601 DPA10301-DPB11801 DPA10301-DPB12301 DPA10301-DPB13901 DPA10301-DPB14001 DPA10301-DPB14901 DPA10301-DPB15501 DPA10301-DPB16501 DPA10301-DPB17501 DPA10301-DPB18001 DPA10401-DPB10101 DPA10401-DPB10201; note = HLAs: DPA10401-DPB10202 DPA10401-DPB10402 DPA10401-DPB10501 DPA10401-DPB110501 DPA10401-DPB14901
PPFLWGGFELIPDK

SEQ ID NO: 6396 - protein, 14 aa, synthetic construct
  source 1..14: note = Seed: PPFLWMGYELHPDK; note = HLAs: DPA10103-DPB10101 DPA10103-DPB10201 DPA10103-DPB10202 DPA10103-DPB10401 DPA10103-DPB112601 DPA10103-DPB11501 DPA10103-DPB11601 DPA10103-DPB11901 DPA10103-DPB12301 DPA10103-DPB13101 DPA10103-DPB13401 DPA10103-DPB13901 DPA10103-DPB14001 DPA10103-DPB14101 DPA10103-DPB14801 DPA10103-DPB15001 DPA10103-DPB15901 DPA10104-DPB10101 DPA10104-DPB11501 DPA10105-DPB10101 DPA10105-DPB10401 DPA10105-DPB15001 DPA10106-DPB10101 DPA10201-DPB10101 DPA10201-DPB110601 DPA10201-DPB11501 DPA10201-DPB11601 DPA10201-DPB11901 DPA10202-DPB10101 DPA10202-DPB10201 DPA10202-DPB10202 DPA10202-DPB10401 DPA10202-DPB110601 DPA10202-DPB11901 DPA10202-DPB13101 DPA10202-DPB16501 DPA10301-DPB10101 DPA10301-DPB10201 DPA10301-DPB10202 DPA10301-DPB10401 DPA10301-DPB10402 DPA10301-DPB110501 DPA10301-DPB110601 DPA10301-DPB11801 DPA10301-DPB12301 DPA10301-DPB13901 DPA10301-DPB14001 DPA10301-DPB14901 DPA10301-DPB16501 DPA10301-DPB17501 DPA10301-DPB18001 DPA10401-DPB10101 DPA10401-DPB10201 DPA10401-DPB10202; note = HLAs: DPA10401-DPB10402 DPA10401-DPB10501 DPA10401-DPB110501 DPA10401-DPB14901
PPILWHGFELLPDK

SEQ ID NO: 6397 - protein, 14 aa, synthetic construct
  source 1..14: note = Seed: PPFLWMGYELHPDK; note = HLAs: DPA10103-DPB10101 DPA10103-DPB10201 DPA10103-DPB10202 DPA10103-DPB10401 DPA10103-DPB112601 DPA10103-DPB11501 DPA10103-DPB11601 DPA10103-DPB11901 DPA10103-DPB12301 DPA10103-DPB13101 DPA10103-DPB13401 DPA10103-DPB13901 DPA10103-DPB14001 DPA10103-DPB14101 DPA10103-DPB14801 DPA10103-DPB15001 DPA10103-DPB15901 DPA10104-DPB10101 DPA10104-DPB11501 DPA10105-DPB10101 DPA10105-DPB10401 DPA10105-DPB15001 DPA10106-DPB10101 DPA10201-DPB10101 DPA10201-DPB110601 DPA10201-DPB11501 DPA10201-DPB11601 DPA10201-DPB11901 DPA10202-DPB10101 DPA10202-DPB10201 DPA10202-DPB10202 DPA10202-DPB10401 DPA10202-DPB110601 DPA10202-DPB11901 DPA10202-DPB13101 DPA10202-DPB16501 DPA10301-DPB10101 DPA10301-DPB10201 DPA10301-DPB10202 DPA10301-DPB10401 DPA10301-DPB10402 DPA10301-DPB110501 DPA10301-DPB110601 DPA10301-DPB11801 DPA10301-DPB12301 DPA10301-DPB13901 DPA10301-DPB14001 DPA10301-DPB14901 DPA10301-DPB15501 DPA10301-DPB16501 DPA10301-DPB17501 DPA10301-DPB18001 DPA10401-DPB10101 DPA10401-DPB10201; note = HLAs: DPA10401-DPB10202 DPA10401-DPB10402 DPA10401-DPB10501 DPA10401-DPB110501 DPA10401-DPB14901
PPILWAGFELIPDK

SEQ ID NO: 6398 - protein, 20 aa, synthetic construct
  source 1..20: note = Seed: KEPPFLWMGYELHPDKWTVQ; note = HLAs: DRB1_0101 DPA10103-DPB10101 DPA10103-DPB10201 DPA10103-DPB10202 DPA10103-DPB10401 DPA10103-DPB10402 DPA10103-DPB10501 DPA10103-DPB110501 DPA10103-DPB112601 DPA10103-DPB11501 DPA10103-DPB11601 DPA10103-DPB11801 DPA10103-DPB11901 DPA10103-DPB12301 DPA10103-DPB13101 DPA10103-DPB13401 DPA10103-DPB13901 DPA10103-DPB14001 DPA10103-DPB14101 DPA10103-DPB14801 DPA10103-DPB14901 DPA10103-DPB15001 DPA10103-DPB15101 DPA10103-DPB15501 DPA10103-DPB15901 DPA10103-DPB18001 DPA10104-DPB10101 DPA10104-DPB11501 DPA10105-DPB10101 DPA10105-DPB10401 DPA10105-DPB11801 DPA10105-DPB15001 DPA10106-DPB10101 DPA10201-DPB10101 DPA10201-DPB10201 DPA10201-DPB10202 DPA10201-DPB10401 DPA10201-DPB10501 DPA10201-DPB110601 DPA10201-DPB11501 DPA10201-DPB11601 DPA10201-DPB11901 DPA10201-DPB13401 DPA10201-DPB15501 DPA10202-DPB10101 DPA10202-DPB10201 DPA10202-DPB10202 DPA10202-DPB10401 DPA10202-DPB10501 DPA10202-DPB110601 DPA10202-DPB11101 DPA10202-DPB11301 DPA10202-DPB11801 DPA10202-DPB11901 DPA10202-DPB13101; note = HLAs: DPA10202-DPB13801 DPA10202-DPB15501 DPA10202-DPB16501 DPA10301-DPB10101 DPA10301-DPB10201 DPA10301-DPB10202 DPA10301-DPB10401 DPA10301-DPB10402 DPA10301-DPB110501 DPA10301-DPB110601 DPA10301-DPB11101 DPA10301-DPB11301 DPA10301-DPB11801 DPA10301-DPB12301 DPA10301-DPB13901 DPA10301-DPB14001 DPA10301-DPB14901 DPA10301-DPB15501 DPA10301-DPB16501 DPA10301-DPB17501 DPA10301-DPB18001 DPA10401-DPB10101 DPA10401-DPB10201 DPA10401-DPB10202 DPA10401-DPB10402 DPA10401-DPB10501 DPA10401-DPB110501 DPA10401-DPB14901
KEPPFLWQGFELFPDKWTVQ

SEQ ID NO: 6399 - protein, 14 aa, synthetic construct
  source 1..14: note = Seed: PPFLWMGYELHPDK; note = HLAs: DRB1_1001 DPA10103-DPB10101 DPA10103-DPB10201 DPA10103-DPB10202 DPA10103-DPB10401 DPA10103-DPB112601 DPA10103-DPB11501 DPA10103-DPB11601 DPA10103-DPB11901 DPA10103-DPB12301 DPA10103-DPB13101 DPA10103-DPB13401 DPA10103-DPB13901 DPA10103-DPB14001 DPA10103-DPB14101 DPA10103-DPB14801 DPA10103-DPB15001 DPA10103-DPB15901 DPA10104-DPB10101 DPA10104-DPB11501 DPA10105-DPB10101 DPA10105-DPB10401 DPA10105-DPB15001 DPA10106-DPB10101 DPA10201-DPB10101 DPA10201-DPB110601 DPA10201-DPB11501 DPA10201-DPB11601 DPA10201-DPB11901 DPA10202-DPB10101 DPA10202-DPB10201 DPA10202-DPB10202 DPA10202-DPB10401 DPA10202-DPB110601 DPA10202-DPB11901 DPA10202-DPB13101 DPA10202-DPB16501 DPA10301-DPB10101 DPA10301-DPB10201 DPA10301-DPB10202 DPA10301-DPB10401 DPA10301-DPB10402 DPA10301-DPB110501 DPA10301-DPB110601 DPA10301-DPB11801 DPA10301-DPB12301 DPA10301-DPB13901 DPA10301-DPB14001 DPA10301-DPB14901 DPA10301-DPB15501 DPA10301-DPB16501 DPA10301-DPB17501 DPA10301-DPB18001 DPA10401-DPB10101 DPA10401-DPB10201; note = HLAs: DPA10401-DPB10202 DPA10401-DPB10402 DPA10401-DPB10501 DPA10401-DPB110501 DPA10401-DPB14901
PPFLWAGWELLPDK

SEQ ID NO: 6400 - protein, 14 aa, synthetic construct
  source 1..14: note = Seed: PPFLWMGYELHPDK; note = HLAs: DPA10103-DPB10101 DPA10103-DPB10201 DPA10103-DPB10202 DPA10103-DPB10401 DPA10103-DPB112601 DPA10103-DPB11501 DPA10103-DPB11601 DPA10103-DPB11901 DPA10103-DPB12301 DPA10103-DPB13101 DPA10103-DPB13401 DPA10103-DPB13901 DPA10103-DPB14001 DPA10103-DPB14101 DPA10103-DPB14801 DPA10103-DPB15001 DPA10103-DPB15901 DPA10104-DPB10101 DPA10104-DPB11501 DPA10105-DPB10101 DPA10105-DPB10401 DPA10105-DPB15001 DPA10106-DPB10101 DPA10201-DPB10101 DPA10201-DPB110601 DPA10201-DPB11501 DPA10201-DPB11601 DPA10201-DPB11901 DPA10202-DPB10101 DPA10202-DPB10201 DPA10202-DPB10202 DPA10202-DPB10401 DPA10202-DPB110601 DPA10202-DPB11901 DPA10202-DPB13101 DPA10202-DPB16501 DPA10301-DPB10101 DPA10301-DPB10201 DPA10301-DPB10202 DPA10301-DPB10401 DPA10301-DPB10402 DPA10301-DPB110501 DPA10301-DPB110601 DPA10301-DPB11801 DPA10301-DPB12301 DPA10301-DPB13901 DPA10301-DPB14001 DPA10301-DPB14901 DPA10301-DPB15501 DPA10301-DPB16501 DPA10301-DPB17501 DPA10301-DPB18001 DPA10401-DPB10101 DPA10401-DPB10201; note = HLAs: DPA10401-DPB10202 DPA10401-DPB10402 DPA10401-DPB10501 DPA10401-DPB110501 DPA10401-DPB14901
PPFLWHGFELTPDK

SEQ ID NO: 6401 - protein, 14 aa, synthetic construct
  source 1..14: note = Seed: PPFLWMGYELHPDK; note = HLAs: DPA10103-DPB10101 DPA10103-DPB10201 DPA10103-DPB10202 DPA10103-DPB10401 DPA10103-DPB112601 DPA10103-DPB11501 DPA10103-DPB11601 DPA10103-DPB11901 DPA10103-DPB12301 DPA10103-DPB13101 DPA10103-DPB13401 DPA10103-DPB13901 DPA10103-DPB14001 DPA10103-DPB14101 DPA10103-DPB14801 DPA10103-DPB15001 DPA10103-DPB15901 DPA10104-DPB10101 DPA10104-DPB11501 DPA10105-DPB10101 DPA10105-DPB10401 DPA10105-DPB15001 DPA10106-DPB10101 DPA10201-DPB10101 DPA10201-DPB110601 DPA10201-DPB11501 DPA10201-DPB11601 DPA10201-DPB11901 DPA10202-DPB10101 DPA10202-DPB10201 DPA10202-DPB10202 DPA10202-DPB10401 DPA10202-DPB110601 DPA10202-DPB11901 DPA10202-DPB13101 DPA10202-DPB16501 DPA10301-DPB10201 DPA10301-DPB10202 DPA10301-DPB10401 DPA10301-DPB10402 DPA10301-DPB110501 DPA10301-DPB110601 DPA10301-DPB11801 DPA10301-DPB12301 DPA10301-DPB13901 DPA10301-DPB14001 DPA10301-DPB14901 DPA10301-DPB16501 DPA10301-DPB17501 DPA10301-DPB18001 DPA10401-DPB10101 DPA10401-DPB10201 DPA10401-DPB10202 DPA10401-DPB10402; note = HLAs: DPA10401-DPB10501 DPA10401-DPB110501 DPA10401-DPB14901
PPFLWRGFELLPDK

SEQ ID NO: 6402 - protein, 20 aa, synthetic construct
  source 1..20: note = Seed: KEPPFLWMGYELHPDKWTVQ; note = HLAs: DRB1_0101 DPA10103-DPB10101 DPA10103-DPB10201 DPA10103-DPB10202 DPA10103-DPB10401 DPA10103-DPB10402 DPA10103-DPB10501 DPA10103-DPB110501 DPA10103-DPB112601 DPA10103-DPB11501 DPA10103-DPB11601 DPA10103-DPB11801 DPA10103-DPB11901 DPA10103-DPB12301 DPA10103-DPB13101 DPA10103-DPB13401 DPA10103-DPB13901 DPA10103-DPB14001 DPA10103-DPB14101 DPA10103-DPB14801 DPA10103-DPB14901 DPA10103-DPB15001 DPA10103-DPB15101 DPA10103-DPB15501 DPA10103-DPB15901 DPA10103-DPB18001 DPA10104-DPB10101 DPA10104-DPB11501 DPA10105-DPB10101 DPA10105-DPB10401 DPA10105-DPB11801 DPA10105-DPB15001 DPA10106-DPB10101 DPA10201-DPB10101 DPA10201-DPB10201 DPA10201-DPB10202 DPA10201-DPB10401 DPA10201-DPB10501 DPA10201-DPB110601 DPA10201-DPB11501 DPA10201-DPB11601 DPA10201-DPB11901 DPA10201-DPB13401 DPA10201-DPB15501 DPA10202-DPB10101 DPA10202-DPB10201 DPA10202-DPB10202 DPA10202-DPB10401 DPA10202-DPB10501 DPA10202-DPB110601 DPA10202-DPB11101 DPA10202-DPB11301 DPA10202-DPB11801 DPA10202-DPB11901 DPA10202-DPB13101; note = HLAs: DPA10202-DPB13801 DPA10202-DPB15501 DPA10202-DPB16501 DPA10301-DPB10101 DPA10301-DPB10201 DPA10301-DPB10202 DPA10301-DPB10401 DPA10301-DPB10402 DPA10301-DPB110501 DPA10301-DPB110601 DPA10301-DPB11101 DPA10301-DPB11301 DPA10301-DPB11801 DPA10301-DPB12301 DPA10301-DPB13901 DPA10301-DPB14001 DPA10301-DPB14901 DPA10301-DPB15501 DPA10301-DPB16501 DPA10301-DPB17501 DPA10301-DPB18001 DPA10401-DPB10101 DPA10401-DPB10201 DPA10401-DPB10202 DPA10401-DPB10402 DPA10401-DPB10501 DPA10401-DPB110501 DPA10401-DPB14901
KEPPFLWIGYELIPDKWTVQ

SEQ ID NO: 6403 - protein, 20 aa, synthetic construct
  source 1..20: note = Seed: KEPPFLWMGYELHPDKWTVQ; note = HLAs: DRB1_0101 DRB1_1001 DPA10103-DPB10101 DPA10103-DPB10201 DPA10103-DPB10202 DPA10103-DPB10401 DPA10103-DPB10402 DPA10103-DPB10501 DPA10103-DPB110501 DPA10103-DPB112601 DPA10103-DPB11501 DPA10103-DPB11601 DPA10103-DPB11801 DPA10103-DPB11901 DPA10103-DPB12301 DPA10103-DPB13101 DPA10103-DPB13401 DPA10103-DPB13901 DPA10103-DPB14001 DPA10103-DPB14101 DPA10103-DPB14801 DPA10103-DPB14901 DPA10103-DPB15001 DPA10103-DPB15101 DPA10103-DPB15501 DPA10103-DPB15901 DPA10103-DPB18001 DPA10104-DPB10101 DPA10104-DPB11501 DPA10105-DPB10101 DPA10105-DPB10401 DPA10105-DPB11801 DPA10105-DPB15001 DPA10106-DPB10101 DPA10201-DPB10101 DPA10201-DPB10201 DPA10201-DPB10202 DPA10201-DPB10401 DPA10201-DPB10501 DPA10201-DPB110601 DPA10201-DPB11501 DPA10201-DPB11601 DPA10201-DPB11901 DPA10201-DPB13401 DPA10201-DPB15501 DPA10202-DPB10101 DPA10202-DPB10201 DPA10202-DPB10202 DPA10202-DPB10401 DPA10202-DPB10501 DPA10202-DPB110601 DPA10202-DPB11101 DPA10202-DPB11301 DPA10202-DPB11801 DPA10202-DPB11901; note = HLAs: DPA10202-DPB13101 DPA10202-DPB13801 DPA10202-DPB15501 DPA10202-DPB16501 DPA10301-DPB10101 DPA10301-DPB10201 DPA10301-DPB10202 DPA10301-DPB10401 DPA10301-DPB10402 DPA10301-DPB110501 DPA10301-DPB110601 DPA10301-DPB11101 DPA10301-DPB11301 DPA10301-DPB11801 DPA10301-DPB12301 DPA10301-DPB13901 DPA10301-DPB14001 DPA10301-DPB14901 DPA10301-DPB15501 DPA10301-DPB16501 DPA10301-DPB17501 DPA10301-DPB18001 DPA10401-DPB10101 DPA10401-DPB10201 DPA10401-DPB10202 DPA10401-DPB10402 DPA10401-DPB10501 DPA10401-DPB110501 DPA10401-DPB14901
KEPPFLWMGFELVPDKWTVQ

SEQ ID NO: 6404 - protein, 14 aa, synthetic construct
  source 1..14: note = Seed: PPFLWMGYELHPDK; note = HLAs: DPA10103-DPB10101 DPA10103-DPB10201 DPA10103-DPB10202 DPA10103-DPB10401 DPA10103-DPB112601 DPA10103-DPB11501 DPA10103-DPB11601 DPA10103-DPB11901 DPA10103-DPB12301 DPA10103-DPB13101 DPA10103-DPB13401 DPA10103-DPB13901 DPA10103-DPB14001 DPA10103-DPB14101 DPA10103-DPB14801 DPA10103-DPB15001 DPA10103-DPB15901 DPA10104-DPB10101 DPA10104-DPB11501 DPA10105-DPB10101 DPA10105-DPB10401 DPA10105-DPB15001 DPA10106-DPB10101 DPA10201-DPB10101 DPA10201-DPB110601 DPA10201-DPB11501 DPA10201-DPB11601 DPA10201-DPB11901 DPA10202-DPB10101 DPA10202-DPB10201 DPA10202-DPB10202 DPA10202-DPB10401 DPA10202-DPB110601 DPA10202-DPB11901 DPA10202-DPB13101 DPA10202-DPB16501 DPA10301-DPB10101 DPA10301-DPB10201 DPA10301-DPB10202 DPA10301-DPB10401 DPA10301-DPB10402 DPA10301-DPB110501 DPA10301-DPB110601 DPA10301-DPB11801 DPA10301-DPB12301 DPA10301-DPB13901 DPA10301-DPB14001 DPA10301-DPB14901 DPA10301-DPB15501 DPA10301-DPB16501 DPA10301-DPB17501 DPA10301-DPB18001 DPA10401-DPB10101 DPA10401-DPB10201; note = HLAs: DPA10401-DPB10202 DPA10401-DPB10402 DPA10401-DPB10501 DPA10401-DPB110501 DPA10401-DPB14901
PPVLWSGFELLPDK

SEQ ID NO: 6405 - protein, 20 aa, synthetic construct
  source 1..20: note = Seed: KEPPFLWMGYELHPDKWTVQ; note = HLAs: DPA10103-DPB10101 DPA10103-DPB10201 DPA10103-DPB10202 DPA10103-DPB10401 DPA10103-DPB10402 DPA10103-DPB10501 DPA10103-DPB110501 DPA10103-DPB112601 DPA10103-DPB11501 DPA10103-DPB11601 DPA10103-DPB11801 DPA10103-DPB11901 DPA10103-DPB12301 DPA10103-DPB13101 DPA10103-DPB13401 DPA10103-DPB13901 DPA10103-DPB14001 DPA10103-DPB14101 DPA10103-DPB14801 DPA10103-DPB14901 DPA10103-DPB15001 DPA10103-DPB15101 DPA10103-DPB15501 DPA10103-DPB15901 DPA10103-DPB18001 DPA10104-DPB10101 DPA10104-DPB11501 DPA10105-DPB10101 DPA10105-DPB10401 DPA10105-DPB11801 DPA10105-DPB15001 DPA10106-DPB10101 DPA10201-DPB10101 DPA10201-DPB10201 DPA10201-DPB10202 DPA10201-DPB10401 DPA10201-DPB10501 DPA10201-DPB110601 DPA10201-DPB11501 DPA10201-DPB11601 DPA10201-DPB11901 DPA10201-DPB13401 DPA10201-DPB15501 DPA10202-DPB10101 DPA10202-DPB10201 DPA10202-DPB10202 DPA10202-DPB10401 DPA10202-DPB10501 DPA10202-DPB110601 DPA10202-DPB11101 DPA10202-DPB11301 DPA10202-DPB11801 DPA10202-DPB11901 DPA10202-DPB13101 DPA10202-DPB13801; note = HLAs: DPA10202-DPB15501 DPA10202-DPB16501 DPA10301-DPB10101 DPA10301-DPB10201 DPA10301-DPB10202 DPA10301-DPB10401 DPA10301-DPB10402 DPA10301-DPB110501 DPA10301-DPB110601 DPA10301-DPB11101 DPA10301-DPB11301 DPA10301-DPB11801 DPA10301-DPB12301 DPA10301-DPB13901 DPA10301-DPB14001 DPA10301-DPB14901 DPA10301-DPB15501 DPA10301-DPB16501 DPA10301-DPB17501 DPA10301-DPB18001 DPA10401-DPB10101 DPA10401-DPB10201 DPA10401-DPB10202 DPA10401-DPB10402 DPA10401-DPB10501 DPA10401-DPB110501 DPA10401-DPB14901
KEPPFLWGGFELIPDKWTVQ

SEQ ID NO: 6406 - protein, 14 aa, synthetic construct
  source 1..14: note = Seed: PPFLWMGYELHPDK; note = HLAs: DPA10103-DPB10101 DPA10103-DPB10201 DPA10103-DPB10202 DPA10103-DPB10401 DPA10103-DPB112601 DPA10103-DPB11501 DPA10103-DPB11601 DPA10103-DPB11901 DPA10103-DPB12301 DPA10103-DPB13101 DPA10103-DPB13401 DPA10103-DPB13901 DPA10103-DPB14001 DPA10103-DPB14101 DPA10103-DPB14801 DPA10103-DPB15001 DPA10103-DPB15901 DPA10104-DPB10101 DPA10104-DPB11501 DPA10105-DPB10101 DPA10105-DPB10401 DPA10105-DPB15001 DPA10106-DPB10101 DPA10201-DPB10101 DPA10201-DPB110601 DPA10201-DPB11501 DPA10201-DPB11601 DPA10201-DPB11901 DPA10202-DPB10101 DPA10202-DPB10201 DPA10202-DPB10202 DPA10202-DPB10401 DPA10202-DPB110601 DPA10202-DPB11901 DPA10202-DPB13101 DPA10202-DPB16501 DPA10301-DPB10101 DPA10301-DPB10201 DPA10301-DPB10202 DPA10301-DPB10401 DPA10301-DPB10402 DPA10301-DPB110501 DPA10301-DPB110601 DPA10301-DPB11801 DPA10301-DPB12301 DPA10301-DPB13901 DPA10301-DPB14001 DPA10301-DPB14901 DPA10301-DPB15501 DPA10301-DPB16501 DPA10301-DPB17501 DPA10301-DPB18001 DPA10401-DPB10101 DPA10401-DPB10201; note = HLAs: DPA10401-DPB10202 DPA10401-DPB10402 DPA10401-DPB10501 DPA10401-DPB110501 DPA10401-DPB14901
PPFLWFGFELMPDK

SEQ ID NO: 6407 - protein, 14 aa, synthetic construct
  source 1..14: note = Seed: PPFLWMGYELHPDK; note = HLAs: DPA10103-DPB10101 DPA10103-DPB10201 DPA10103-DPB10202 DPA10103-DPB10401 DPA10103-DPB112601 DPA10103-DPB11501 DPA10103-DPB11601 DPA10103-DPB11901 DPA10103-DPB12301 DPA10103-DPB13101 DPA10103-DPB13401 DPA10103-DPB13901 DPA10103-DPB14001 DPA10103-DPB14101 DPA10103-DPB14801 DPA10103-DPB15001 DPA10103-DPB15901 DPA10104-DPB10101 DPA10104-DPB11501 DPA10105-DPB10101 DPA10105-DPB10401 DPA10105-DPB15001 DPA10106-DPB10101 DPA10201-DPB10101 DPA10201-DPB110601 DPA10201-DPB11501 DPA10201-DPB11601 DPA10201-DPB11901 DPA10202-DPB10101 DPA10202-DPB10201 DPA10202-DPB10202 DPA10202-DPB10401 DPA10202-DPB110601 DPA10202-DPB11901 DPA10202-DPB13101 DPA10202-DPB16501 DPA10301-DPB10101 DPA10301-DPB10201 DPA10301-DPB10202 DPA10301-DPB10401 DPA10301-DPB10402 DPA10301-DPB110501 DPA10301-DPB110601 DPA10301-DPB11801 DPA10301-DPB12301 DPA10301-DPB13901 DPA10301-DPB14001 DPA10301-DPB14901 DPA10301-DPB15501 DPA10301-DPB16501 DPA10301-DPB17501 DPA10301-DPB18001 DPA10401-DPB10101 DPA10401-DPB10201; note = HLAs: DPA10401-DPB10202 DPA10401-DPB10402 DPA10401-DPB10501 DPA10401-DPB110501 DPA10401-DPB14901
PPFLWVGFELEPDK

SEQ ID NO: 6408 - protein, 20 aa, synthetic construct
  source 1..20: note = Seed: KEPPFLWMGYELHPDKWTVQ; note = HLAs: DRB1_1001 DPA10103-DPB10101 DPA10103-DPB10201 DPA10103-DPB10202 DPA10103-DPB10401 DPA10103-DPB10402 DPA10103-DPB10501 DPA10103-DPB110501 DPA10103-DPB112601 DPA10103-DPB11501 DPA10103-DPB11601 DPA10103-DPB11801 DPA10103-DPB11901 DPA10103-DPB12301 DPA10103-DPB13101 DPA10103-DPB13401 DPA10103-DPB13901 DPA10103-DPB14001 DPA10103-DPB14101 DPA10103-DPB14801 DPA10103-DPB14901 DPA10103-DPB15001 DPA10103-DPB15101 DPA10103-DPB15501 DPA10103-DPB15901 DPA10103-DPB18001 DPA10104-DPB10101 DPA10104-DPB11501 DPA10105-DPB10101 DPA10105-DPB10401 DPA10105-DPB11801 DPA10105-DPB15001 DPA10106-DPB10101 DPA10201-DPB10101 DPA10201-DPB10201 DPA10201-DPB10202 DPA10201-DPB10401 DPA10201-DPB10501 DPA10201-DPB110601 DPA10201-DPB11501 DPA10201-DPB11601 DPA10201-DPB11901 DPA10201-DPB13401 DPA10201-DPB15501 DPA10202-DPB10101 DPA10202-DPB10201 DPA10202-DPB10202 DPA10202-DPB10401 DPA10202-DPB10501 DPA10202-DPB110601 DPA10202-DPB11101 DPA10202-DPB11301 DPA10202-DPB11801 DPA10202-DPB11901 DPA10202-DPB13101; note = HLAs: DPA10202-DPB13801 DPA10202-DPB15501 DPA10202-DPB16501 DPA10301-DPB10101 DPA10301-DPB10201 DPA10301-DPB10202 DPA10301-DPB10401 DPA10301-DPB10402 DPA10301-DPB110501 DPA10301-DPB110601 DPA10301-DPB11101 DPA10301-DPB11301 DPA10301-DPB11801 DPA10301-DPB12301 DPA10301-DPB13901 DPA10301-DPB14001 DPA10301-DPB14901 DPA10301-DPB15501 DPA10301-DPB16501 DPA10301-DPB17501 DPA10301-DPB18001 DPA10401-DPB10101 DPA10401-DPB10201 DPA10401-DPB10202 DPA10401-DPB10402 DPA10401-DPB10501 DPA10401-DPB110501 DPA10401-DPB14901
KEPPFLWTGFELEPDKWTVQ

SEQ ID NO: 6409 - protein, 14 aa, synthetic construct
  source 1..14: note = Seed: PPFLWMGYELHPDK; note = HLAs: DPA10103-DPB10101 DPA10103-DPB10201 DPA10103-DPB10202 DPA10103-DPB10401 DPA10103-DPB112601 DPA10103-DPB11501 DPA10103-DPB11601 DPA10103-DPB11901 DPA10103-DPB12301 DPA10103-DPB13101 DPA10103-DPB13401 DPA10103-DPB13901 DPA10103-DPB14001 DPA10103-DPB14101 DPA10103-DPB14801 DPA10103-DPB15001 DPA10103-DPB15901 DPA10104-DPB10101 DPA10104-DPB11501 DPA10105-DPB10101 DPA10105-DPB10401 DPA10105-DPB15001 DPA10106-DPB10101 DPA10201-DPB10101 DPA10201-DPB110601 DPA10201-DPB11501 DPA10201-DPB11601 DPA10201-DPB11901 DPA10202-DPB10101 DPA10202-DPB10201 DPA10202-DPB10202 DPA10202-DPB10401 DPA10202-DPB110601 DPA10202-DPB11901 DPA10202-DPB13101 DPA10202-DPB16501 DPA10301-DPB10101 DPA10301-DPB10201 DPA10301-DPB10202 DPA10301-DPB10401 DPA10301-DPB10402 DPA10301-DPB110501 DPA10301-DPB110601 DPA10301-DPB11801 DPA10301-DPB12301 DPA10301-DPB13901 DPA10301-DPB14001 DPA10301-DPB14901 DPA10301-DPB15501 DPA10301-DPB16501 DPA10301-DPB17501 DPA10301-DPB18001 DPA10401-DPB10101 DPA10401-DPB10201; note = HLAs: DPA10401-DPB10202 DPA10401-DPB10402 DPA10401-DPB10501 DPA10401-DPB110501 DPA10401-DPB14901
PPFLWSGYELFPDK

SEQ ID NO: 6410 - protein, 14 aa, synthetic construct
  source 1..14: note = Seed: PPFLWMGYELHPDK; note = HLAs: DPA10103-DPB10101 DPA10103-DPB10201 DPA10103-DPB10202 DPA10103-DPB10401 DPA10103-DPB112601 DPA10103-DPB11501 DPA10103-DPB11601 DPA10103-DPB11901 DPA10103-DPB12301 DPA10103-DPB13101 DPA10103-DPB13401 DPA10103-DPB13901 DPA10103-DPB14001 DPA10103-DPB14101 DPA10103-DPB14801 DPA10103-DPB15001 DPA10103-DPB15901 DPA10104-DPB10101 DPA10104-DPB11501 DPA10105-DPB10101 DPA10105-DPB10401 DPA10105-DPB15001 DPA10106-DPB10101 DPA10201-DPB10101 DPA10201-DPB110601 DPA10201-DPB11501 DPA10201-DPB11601 DPA10201-DPB11901 DPA10202-DPB10101 DPA10202-DPB10201 DPA10202-DPB10202 DPA10202-DPB10401 DPA10202-DPB110601 DPA10202-DPB11901 DPA10202-DPB13101 DPA10202-DPB16501 DPA10301-DPB10101 DPA10301-DPB10201 DPA10301-DPB10202 DPA10301-DPB10401 DPA10301-DPB10402 DPA10301-DPB110501 DPA10301-DPB110601 DPA10301-DPB11801 DPA10301-DPB12301 DPA10301-DPB13901 DPA10301-DPB14001 DPA10301-DPB14901 DPA10301-DPB15501 DPA10301-DPB16501 DPA10301-DPB17501 DPA10301-DPB18001 DPA10401-DPB10101 DPA10401-DPB10201; note = HLAs: DPA10401-DPB10202 DPA10401-DPB10402 DPA10401-DPB10501 DPA10401-DPB110501 DPA10401-DPB14901
PPFLWWGFELLPDK

SEQ ID NO: 6411 - protein, 20 aa, synthetic construct
  source 1..20: note = Seed: KEPPFLWMGYELHPDKWTVQ; note = HLAs: DRB1_0101 DPA10103-DPB10101 DPA10103-DPB10201 DPA10103-DPB10202 DPA10103-DPB10401 DPA10103-DPB10402 DPA10103-DPB10501 DPA10103-DPB110501 DPA10103-DPB112601 DPA10103-DPB11501 DPA10103-DPB11601 DPA10103-DPB11801 DPA10103-DPB11901 DPA10103-DPB12301 DPA10103-DPB13101 DPA10103-DPB13401 DPA10103-DPB13901 DPA10103-DPB14001 DPA10103-DPB14101 DPA10103-DPB14801 DPA10103-DPB14901 DPA10103-DPB15001 DPA10103-DPB15101 DPA10103-DPB15501 DPA10103-DPB15901 DPA10103-DPB18001 DPA10104-DPB10101 DPA10104-DPB11501 DPA10105-DPB10101 DPA10105-DPB10401 DPA10105-DPB11801 DPA10105-DPB15001 DPA10106-DPB10101 DPA10201-DPB10101 DPA10201-DPB10201 DPA10201-DPB10202 DPA10201-DPB10401 DPA10201-DPB10501 DPA10201-DPB110601 DPA10201-DPB11501 DPA10201-DPB11601 DPA10201-DPB11901 DPA10201-DPB13401 DPA10201-DPB15501 DPA10202-DPB10101 DPA10202-DPB10201 DPA10202-DPB10202 DPA10202-DPB10401 DPA10202-DPB10501 DPA10202-DPB110601 DPA10202-DPB11101 DPA10202-DPB11301 DPA10202-DPB11801 DPA10202-DPB11901 DPA10202-DPB13101; note = HLAs: DPA10202-DPB13801 DPA10202-DPB15501 DPA10202-DPB16501 DPA10301-DPB10101 DPA10301-DPB10201 DPA10301-DPB10202 DPA10301-DPB10401 DPA10301-DPB10402 DPA10301-DPB110501 DPA10301-DPB110601 DPA10301-DPB11101 DPA10301-DPB11301 DPA10301-DPB11801 DPA10301-DPB12301 DPA10301-DPB13901 DPA10301-DPB14001 DPA10301-DPB14901 DPA10301-DPB15501 DPA10301-DPB16501 DPA10301-DPB17501 DPA10301-DPB18001 DPA10401-DPB10101 DPA10401-DPB10201 DPA10401-DPB10202 DPA10401-DPB10402 DPA10401-DPB10501 DPA10401-DPB110501 DPA10401-DPB14901
KEPPFLWGGFELVPDKWTVQ

SEQ ID NO: 6412 - protein, 14 aa, synthetic construct
  source 1..14: note = Seed: PPFLWMGYELHPDK; note = HLAs: DPA10103-DPB10101 DPA10103-DPB10201 DPA10103-DPB10202 DPA10103-DPB10401 DPA10103-DPB112601 DPA10103-DPB11501 DPA10103-DPB11601 DPA10103-DPB11901 DPA10103-DPB12301 DPA10103-DPB13101 DPA10103-DPB13401 DPA10103-DPB13901 DPA10103-DPB14001 DPA10103-DPB14101 DPA10103-DPB14801 DPA10103-DPB15001 DPA10103-DPB15901 DPA10104-DPB10101 DPA10104-DPB11501 DPA10105-DPB10101 DPA10105-DPB10401 DPA10105-DPB15001 DPA10106-DPB10101 DPA10201-DPB10101 DPA10201-DPB110601 DPA10201-DPB11501 DPA10201-DPB11601 DPA10201-DPB11901 DPA10202-DPB10101 DPA10202-DPB10201 DPA10202-DPB10202 DPA10202-DPB10401 DPA10202-DPB110601 DPA10202-DPB11901 DPA10202-DPB13101 DPA10202-DPB16501 DPA10301-DPB10101 DPA10301-DPB10201 DPA10301-DPB10202 DPA10301-DPB10401 DPA10301-DPB10402 DPA10301-DPB110501 DPA10301-DPB110601 DPA10301-DPB11801 DPA10301-DPB12301 DPA10301-DPB13901 DPA10301-DPB14001 DPA10301-DPB14901 DPA10301-DPB15501 DPA10301-DPB16501 DPA10301-DPB17501 DPA10301-DPB18001 DPA10401-DPB10101 DPA10401-DPB10201; note = HLAs: DPA10401-DPB10202 DPA10401-DPB10402 DPA10401-DPB10501 DPA10401-DPB110501 DPA10401-DPB14901
PPWLWEGFELLPDK

SEQ ID NO: 6413 - protein, 20 aa, synthetic construct
  source 1..20: note = Seed: KEPPFLWMGYELHPDKWTVQ; note = HLAs: DRB1_0101 DPA10103-DPB10101 DPA10103-DPB10201 DPA10103-DPB10202 DPA10103-DPB10401 DPA10103-DPB10402 DPA10103-DPB10501 DPA10103-DPB110501 DPA10103-DPB112601 DPA10103-DPB11501 DPA10103-DPB11601 DPA10103-DPB11801 DPA10103-DPB11901 DPA10103-DPB12301 DPA10103-DPB13101 DPA10103-DPB13401 DPA10103-DPB13901 DPA10103-DPB14001 DPA10103-DPB14101 DPA10103-DPB14801 DPA10103-DPB14901 DPA10103-DPB15001 DPA10103-DPB15101 DPA10103-DPB15501 DPA10103-DPB15901 DPA10103-DPB18001 DPA10104-DPB10101 DPA10104-DPB11501 DPA10105-DPB10101 DPA10105-DPB10401 DPA10105-DPB11801 DPA10105-DPB15001 DPA10106-DPB10101 DPA10201-DPB10101 DPA10201-DPB10201 DPA10201-DPB10202 DPA10201-DPB10401 DPA10201-DPB10501 DPA10201-DPB110601 DPA10201-DPB11501 DPA10201-DPB11601 DPA10201-DPB11901 DPA10201-DPB13401 DPA10201-DPB15501 DPA10202-DPB10101 DPA10202-DPB10201 DPA10202-DPB10202 DPA10202-DPB10401 DPA10202-DPB10501 DPA10202-DPB110601 DPA10202-DPB11101 DPA10202-DPB11301 DPA10202-DPB11801 DPA10202-DPB11901 DPA10202-DPB13101; note = HLAs: DPA10202-DPB13801 DPA10202-DPB15501 DPA10202-DPB16501 DPA10301-DPB10101 DPA10301-DPB10201 DPA10301-DPB10202 DPA10301-DPB10401 DPA10301-DPB10402 DPA10301-DPB110501 DPA10301-DPB110601 DPA10301-DPB11101 DPA10301-DPB11301 DPA10301-DPB11801 DPA10301-DPB12301 DPA10301-DPB13901 DPA10301-DPB14001 DPA10301-DPB14901 DPA10301-DPB15501 DPA10301-DPB16501 DPA10301-DPB17501 DPA10301-DPB18001 DPA10401-DPB10101 DPA10401-DPB10201 DPA10401-DPB10202 DPA10401-DPB10402 DPA10401-DPB10501 DPA10401-DPB110501 DPA10401-DPB14901
KEPPFLWHGFELSPDKWTVQ

SEQ ID NO: 6414 - protein, 20 aa, synthetic construct
  source 1..20: note = Seed: KEPPFLWMGYELHPDKWTVQ; note = HLAs: DPA10103-DPB10101 DPA10103-DPB10201 DPA10103-DPB10202 DPA10103-DPB10401 DPA10103-DPB10402 DPA10103-DPB10501 DPA10103-DPB110501 DPA10103-DPB112601 DPA10103-DPB11501 DPA10103-DPB11601 DPA10103-DPB11801 DPA10103-DPB11901 DPA10103-DPB12301 DPA10103-DPB13101 DPA10103-DPB13401 DPA10103-DPB13901 DPA10103-DPB14001 DPA10103-DPB14101 DPA10103-DPB14801 DPA10103-DPB14901 DPA10103-DPB15001 DPA10103-DPB15101 DPA10103-DPB15501 DPA10103-DPB15901 DPA10103-DPB18001 DPA10104-DPB10101 DPA10104-DPB11501 DPA10105-DPB10101 DPA10105-DPB10401 DPA10105-DPB11801 DPA10105-DPB15001 DPA10106-DPB10101 DPA10201-DPB10101 DPA10201-DPB10201 DPA10201-DPB10202 DPA10201-DPB10401 DPA10201-DPB10501 DPA10201-DPB110601 DPA10201-DPB11501 DPA10201-DPB11601 DPA10201-DPB11901 DPA10201-DPB13401 DPA10201-DPB15501 DPA10202-DPB10101 DPA10202-DPB10201 DPA10202-DPB10202 DPA10202-DPB10401 DPA10202-DPB10501 DPA10202-DPB110601 DPA10202-DPB11101 DPA10202-DPB11301 DPA10202-DPB11801 DPA10202-DPB11901 DPA10202-DPB13101 DPA10202-DPB13801; note = HLAs: DPA10202-DPB15501 DPA10202-DPB16501 DPA10301-DPB10101 DPA10301-DPB10201 DPA10301-DPB10202 DPA10301-DPB10401 DPA10301-DPB10402 DPA10301-DPB110501 DPA10301-DPB110601 DPA10301-DPB11301 DPA10301-DPB11801 DPA10301-DPB12301 DPA10301-DPB13901 DPA10301-DPB14001 DPA10301-DPB14901 DPA10301-DPB15501 DPA10301-DPB16501 DPA10301-DPB17501 DPA10301-DPB18001 DPA10401-DPB10101 DPA10401-DPB10201 DPA10401-DPB10202 DPA10401-DPB10402 DPA10401-DPB10501 DPA10401-DPB110501 DPA10401-DPB14901
KEPPLLWHGFELLPDKWTVQ

SEQ ID NO: 6415 - protein, 20 aa, synthetic construct
  source 1..20: note = Seed: KEPPFLWMGYELHPDKWTVQ; note = HLAs: DPA10103-DPB10101 DPA10103-DPB10201 DPA10103-DPB10202 DPA10103-DPB10401 DPA10103-DPB10402 DPA10103-DPB10501 DPA10103-DPB110501 DPA10103-DPB112601 DPA10103-DPB11501 DPA10103-DPB11601 DPA10103-DPB11801 DPA10103-DPB11901 DPA10103-DPB12301 DPA10103-DPB13101 DPA10103-DPB13401 DPA10103-DPB13901 DPA10103-DPB14001 DPA10103-DPB14101 DPA10103-DPB14801 DPA10103-DPB14901 DPA10103-DPB15001 DPA10103-DPB15101 DPA10103-DPB15501 DPA10103-DPB15901 DPA10103-DPB18001 DPA10104-DPB10101 DPA10104-DPB11501 DPA10105-DPB10101 DPA10105-DPB10401 DPA10105-DPB11801 DPA10105-DPB15001 DPA10106-DPB10101 DPA10201-DPB10101 DPA10201-DPB10201 DPA10201-DPB10202 DPA10201-DPB10401 DPA10201-DPB10501 DPA10201-DPB110601 DPA10201-DPB11501 DPA10201-DPB11601 DPA10201-DPB11901 DPA10201-DPB13401 DPA10201-DPB15501 DPA10202-DPB10101 DPA10202-DPB10201 DPA10202-DPB10202 DPA10202-DPB10401 DPA10202-DPB10501 DPA10202-DPB110601 DPA10202-DPB11101 DPA10202-DPB11301 DPA10202-DPB11801 DPA10202-DPB11901 DPA10202-DPB13101 DPA10202-DPB13801; note = HLAs: DPA10202-DPB15501 DPA10202-DPB16501 DPA10301-DPB10101 DPA10301-DPB10201 DPA10301-DPB10202 DPA10301-DPB10401 DPA10301-DPB10402 DPA10301-DPB110501 DPA10301-DPB110601 DPA10301-DPB11101 DPA10301-DPB11301 DPA10301-DPB11801 DPA10301-DPB12301 DPA10301-DPB13901 DPA10301-DPB14001 DPA10301-DPB14901 DPA10301-DPB15501 DPA10301-DPB16501 DPA10301-DPB17501 DPA10301-DPB18001 DPA10401-DPB10101 DPA10401-DPB10201 DPA10401-DPB10202 DPA10401-DPB10402 DPA10401-DPB10501 DPA10401-DPB110501 DPA10401-DPB14901
KEPPFLWVGFELYPDKWTVQ

SEQ ID NO: 6416 - protein, 20 aa, synthetic construct
  source 1..20: note = Seed: KEPPFLWMGYELHPDKWTVQ; note = HLAs: DRB1_1001 DPA10103-DPB10101 DPA10103-DPB10201 DPA10103-DPB10202 DPA10103-DPB10401 DPA10103-DPB10402 DPA10103-DPB10501 DPA10103-DPB110501 DPA10103-DPB112601 DPA10103-DPB11501 DPA10103-DPB11601 DPA10103-DPB11801 DPA10103-DPB11901 DPA10103-DPB12301 DPA10103-DPB13101 DPA10103-DPB13401 DPA10103-DPB13901 DPA10103-DPB14001 DPA10103-DPB14101 DPA10103-DPB14801 DPA10103-DPB14901 DPA10103-DPB15001 DPA10103-DPB15101 DPA10103-DPB15501 DPA10103-DPB15901 DPA10103-DPB18001 DPA10104-DPB10101 DPA10104-DPB11501 DPA10105-DPB10101 DPA10105-DPB10401 DPA10105-DPB11801 DPA10105-DPB15001 DPA10106-DPB10101 DPA10201-DPB10101 DPA10201-DPB10201 DPA10201-DPB10202 DPA10201-DPB10401 DPA10201-DPB10501 DPA10201-DPB110601 DPA10201-DPB11501 DPA10201-DPB11601 DPA10201-DPB11901 DPA10201-DPB13401 DPA10201-DPB15501 DPA10202-DPB10101 DPA10202-DPB10201 DPA10202-DPB10202 DPA10202-DPB10401 DPA10202-DPB10501 DPA10202-DPB110601 DPA10202-DPB11101 DPA10202-DPB11301 DPA10202-DPB11801 DPA10202-DPB11901 DPA10202-DPB13101; note = HLAs: DPA10202-DPB13801 DPA10202-DPB15501 DPA10202-DPB16501 DPA10301-DPB10101 DPA10301-DPB10201 DPA10301-DPB10202 DPA10301-DPB10401 DPA10301-DPB10402 DPA10301-DPB110501 DPA10301-DPB110601 DPA10301-DPB11101 DPA10301-DPB11301 DPA10301-DPB11801 DPA10301-DPB12301 DPA10301-DPB13901 DPA10301-DPB14001 DPA10301-DPB14901 DPA10301-DPB15501 DPA10301-DPB16501 DPA10301-DPB17501 DPA10301-DPB18001 DPA10401-DPB10101 DPA10401-DPB10201 DPA10401-DPB10202 DPA10401-DPB10402 DPA10401-DPB10501 DPA10401-DPB110501 DPA10401-DPB14901
KEPPFLWDGFELVPDKWTVQ

SEQ ID NO: 6417 - protein, 14 aa, synthetic construct
  source 1..14: note = Seed: PPFLWMGYELHPDK; note = HLAs: DPA10103-DPB10101 DPA10103-DPB10201 DPA10103-DPB10202 DPA10103-DPB10401 DPA10103-DPB112601 DPA10103-DPB11501 DPA10103-DPB11601 DPA10103-DPB11901 DPA10103-DPB12301 DPA10103-DPB13101 DPA10103-DPB13401 DPA10103-DPB13901 DPA10103-DPB14001 DPA10103-DPB14101 DPA10103-DPB14801 DPA10103-DPB15001 DPA10103-DPB15901 DPA10104-DPB10101 DPA10104-DPB11501 DPA10105-DPB10101 DPA10105-DPB10401 DPA10105-DPB15001 DPA10106-DPB10101 DPA10201-DPB10101 DPA10201-DPB110601 DPA10201-DPB11501 DPA10201-DPB11601 DPA10201-DPB11901 DPA10202-DPB10101 DPA10202-DPB10201 DPA10202-DPB10202 DPA10202-DPB10401 DPA10202-DPB110601 DPA10202-DPB11901 DPA10202-DPB13101 DPA10202-DPB16501 DPA10301-DPB10101 DPA10301-DPB10201 DPA10301-DPB10202 DPA10301-DPB10401 DPA10301-DPB10402 DPA10301-DPB110501 DPA10301-DPB110601 DPA10301-DPB11801 DPA10301-DPB12301 DPA10301-DPB13901 DPA10301-DPB14001 DPA10301-DPB14901 DPA10301-DPB15501 DPA10301-DPB16501 DPA10301-DPB17501 DPA10301-DPB18001 DPA10401-DPB10101 DPA10401-DPB10201; note = HLAs: DPA10401-DPB10202 DPA10401-DPB10402 DPA10401-DPB10501 DPA10401-DPB110501 DPA10401-DPB14901
PPFLWHGFELYPDK

SEQ ID NO: 6418 - protein, 20 aa, synthetic construct
  source 1..20: note = Seed: KEPPFLWMGYELHPDKWTVQ; note = HLAs: DPA10103-DPB10101 DPA10103-DPB10201 DPA10103-DPB10202 DPA10103-DPB10401 DPA10103-DPB10402 DPA10103-DPB10501 DPA10103-DPB110501 DPA10103-DPB112601 DPA10103-DPB11501 DPA10103-DPB11601 DPA10103-DPB11801 DPA10103-DPB11901 DPA10103-DPB12301 DPA10103-DPB13101 DPA10103-DPB13401 DPA10103-DPB13901 DPA10103-DPB14001 DPA10103-DPB14101 DPA10103-DPB14801 DPA10103-DPB14901 DPA10103-DPB15001 DPA10103-DPB15101 DPA10103-DPB15501 DPA10103-DPB15901 DPA10103-DPB18001 DPA10104-DPB10101 DPA10104-DPB11501 DPA10105-DPB10101 DPA10105-DPB10401 DPA10105-DPB11801 DPA10105-DPB15001 DPA10106-DPB10101 DPA10201-DPB10101 DPA10201-DPB10201 DPA10201-DPB10202 DPA10201-DPB10401 DPA10201-DPB10501 DPA10201-DPB110601 DPA10201-DPB11501 DPA10201-DPB11601 DPA10201-DPB11901 DPA10201-DPB13401 DPA10201-DPB15501 DPA10202-DPB10101 DPA10202-DPB10201 DPA10202-DPB10202 DPA10202-DPB10401 DPA10202-DPB10501 DPA10202-DPB110601 DPA10202-DPB11101 DPA10202-DPB11301 DPA10202-DPB11801 DPA10202-DPB11901 DPA10202-DPB13101 DPA10202-DPB13801; note = HLAs: DPA10202-DPB15501 DPA10202-DPB16501 DPA10301-DPB10101 DPA10301-DPB10201 DPA10301-DPB10202 DPA10301-DPB10401 DPA10301-DPB10402 DPA10301-DPB110501 DPA10301-DPB110601 DPA10301-DPB11101 DPA10301-DPB11301 DPA10301-DPB11801 DPA10301-DPB12301 DPA10301-DPB13901 DPA10301-DPB14001 DPA10301-DPB14901 DPA10301-DPB15501 DPA10301-DPB16501 DPA10301-DPB17501 DPA10301-DPB18001 DPA10401-DPB10101 DPA10401-DPB10201 DPA10401-DPB10202 DPA10401-DPB10402 DPA10401-DPB10501 DPA10401-DPB110501 DPA10401-DPB14901
KEPPYLWSGFELFPDKWTVQ

SEQ ID NO: 6419 - protein, 20 aa, synthetic construct
  source 1..20: note = Seed: KEPPFLWMGYELHPDKWTVQ; note = HLAs: DPA10103-DPB10101 DPA10103-DPB10201 DPA10103-DPB10202 DPA10103-DPB10401 DPA10103-DPB10402 DPA10103-DPB10501 DPA10103-DPB110501 DPA10103-DPB112601 DPA10103-DPB11501 DPA10103-DPB11601 DPA10103-DPB11801 DPA10103-DPB11901 DPA10103-DPB12301 DPA10103-DPB13101 DPA10103-DPB13401 DPA10103-DPB13901 DPA10103-DPB14001 DPA10103-DPB14101 DPA10103-DPB14801 DPA10103-DPB14901 DPA10103-DPB15001 DPA10103-DPB15101 DPA10103-DPB15501 DPA10103-DPB15901 DPA10103-DPB18001 DPA10104-DPB10101 DPA10104-DPB11501 DPA10105-DPB10101 DPA10105-DPB10401 DPA10105-DPB11801 DPA10105-DPB15001 DPA10106-DPB10101 DPA10201-DPB10101 DPA10201-DPB10201 DPA10201-DPB10202 DPA10201-DPB10401 DPA10201-DPB10501 DPA10201-DPB110601 DPA10201-DPB11501 DPA10201-DPB11601 DPA10201-DPB11901 DPA10201-DPB13401 DPA10201-DPB15501 DPA10202-DPB10101 DPA10202-DPB10201 DPA10202-DPB10202 DPA10202-DPB10401 DPA10202-DPB10501 DPA10202-DPB110601 DPA10202-DPB11101 DPA10202-DPB11301 DPA10202-DPB11801 DPA10202-DPB11901 DPA10202-DPB13101 DPA10202-DPB13801; note = HLAs: DPA10202-DPB15501 DPA10202-DPB16501 DPA10301-DPB10101 DPA10301-DPB10201 DPA10301-DPB10202 DPA10301-DPB10401 DPA10301-DPB10402 DPA10301-DPB110501 DPA10301-DPB110601 DPA10301-DPB11101 DPA10301-DPB11301 DPA10301-DPB11801 DPA10301-DPB12301 DPA10301-DPB13901 DPA10301-DPB14001 DPA10301-DPB14901 DPA10301-DPB15501 DPA10301-DPB16501 DPA10301-DPB17501 DPA10301-DPB18001 DPA10401-DPB10101 DPA10401-DPB10201 DPA10401-DPB10202 DPA10401-DPB10402 DPA10401-DPB10501 DPA10401-DPB110501 DPA10401-DPB14901
KEPPFLWEGFELYPDKWTVQ

SEQ ID NO: 6420 - protein, 20 aa, synthetic construct
  source 1..20: note = Seed: KEPPFLWMGYELHPDKWTVQ; note = HLAs: DPA10103-DPB10101 DPA10103-DPB10201 DPA10103-DPB10202 DPA10103-DPB10401 DPA10103-DPB10402 DPA10103-DPB10501 DPA10103-DPB110501 DPA10103-DPB112601 DPA10103-DPB11501 DPA10103-DPB11601 DPA10103-DPB11801 DPA10103-DPB11901 DPA10103-DPB12301 DPA10103-DPB13101 DPA10103-DPB13401 DPA10103-DPB13901 DPA10103-DPB14001 DPA10103-DPB14101 DPA10103-DPB14801 DPA10103-DPB14901 DPA10103-DPB15001 DPA10103-DPB15101 DPA10103-DPB15501 DPA10103-DPB15901 DPA10103-DPB18001 DPA10104-DPB10101 DPA10104-DPB11501 DPA10105-DPB10101 DPA10105-DPB10401 DPA10105-DPB11801 DPA10105-DPB15001 DPA10106-DPB10101 DPA10201-DPB10101 DPA10201-DPB10201 DPA10201-DPB10202 DPA10201-DPB10401 DPA10201-DPB10501 DPA10201-DPB110601 DPA10201-DPB11501 DPA10201-DPB11601 DPA10201-DPB11901 DPA10201-DPB13401 DPA10201-DPB15501 DPA10202-DPB10101 DPA10202-DPB10201 DPA10202-DPB10202 DPA10202-DPB10401 DPA10202-DPB10501 DPA10202-DPB110601 DPA10202-DPB11101 DPA10202-DPB11301 DPA10202-DPB11801 DPA10202-DPB11901 DPA10202-DPB13101 DPA10202-DPB13801; note = HLAs: DPA10202-DPB15501 DPA10202-DPB16501 DPA10301-DPB10101 DPA10301-DPB10201 DPA10301-DPB10202 DPA10301-DPB10401 DPA10301-DPB10402 DPA10301-DPB110501 DPA10301-DPB110601 DPA10301-DPB11101 DPA10301-DPB11301 DPA10301-DPB11801 DPA10301-DPB12301 DPA10301-DPB13901 DPA10301-DPB14001 DPA10301-DPB14901 DPA10301-DPB15501 DPA10301-DPB16501 DPA10301-DPB17501 DPA10301-DPB18001 DPA10401-DPB10101 DPA10401-DPB10201 DPA10401-DPB10202 DPA10401-DPB10402 DPA10401-DPB10501 DPA10401-DPB110501 DPA10401-DPB14901
KEPPFLWHGFELYPDKWTVQ

SEQ ID NO: 6421 - protein, 20 aa, synthetic construct
  source 1..20: note = Seed: KEPPFLWMGYELHPDKWTVQ; note = HLAs: DPA10103-DPB10101 DPA10103-DPB10201 DPA10103-DPB10202 DPA10103-DPB10401 DPA10103-DPB10402 DPA10103-DPB10501 DPA10103-DPB110501 DPA10103-DPB112601 DPA10103-DPB11501 DPA10103-DPB11601 DPA10103-DPB11801 DPA10103-DPB11901 DPA10103-DPB12301 DPA10103-DPB13101 DPA10103-DPB13401 DPA10103-DPB13901 DPA10103-DPB14001 DPA10103-DPB14101 DPA10103-DPB14801 DPA10103-DPB14901 DPA10103-DPB15001 DPA10103-DPB15101 DPA10103-DPB15501 DPA10103-DPB15901 DPA10103-DPB18001 DPA10104-DPB10101 DPA10104-DPB11501 DPA10105-DPB10101 DPA10105-DPB10401 DPA10105-DPB11801 DPA10105-DPB15001 DPA10106-DPB10101 DPA10201-DPB10101 DPA10201-DPB10201 DPA10201-DPB10202 DPA10201-DPB10401 DPA10201-DPB10501 DPA10201-DPB110601 DPA10201-DPB11501 DPA10201-DPB11601 DPA10201-DPB11901 DPA10201-DPB13401 DPA10201-DPB15501 DPA10202-DPB10101 DPA10202-DPB10201 DPA10202-DPB10202 DPA10202-DPB10401 DPA10202-DPB10501 DPA10202-DPB110601 DPA10202-DPB11101 DPA10202-DPB11301 DPA10202-DPB11801 DPA10202-DPB11901 DPA10202-DPB13101 DPA10202-DPB13801; note = HLAs: DPA10202-DPB15501 DPA10202-DPB16501 DPA10301-DPB10101 DPA10301-DPB10201 DPA10301-DPB10202 DPA10301-DPB10401 DPA10301-DPB10402 DPA10301-DPB110501 DPA10301-DPB110601 DPA10301-DPB11101 DPA10301-DPB11301 DPA10301-DPB11801 DPA10301-DPB12301 DPA10301-DPB13901 DPA10301-DPB14001 DPA10301-DPB14901 DPA10301-DPB15501 DPA10301-DPB16501 DPA10301-DPB17501 DPA10301-DPB18001 DPA10401-DPB10101 DPA10401-DPB10201 DPA10401-DPB10202 DPA10401-DPB10402 DPA10401-DPB10501 DPA10401-DPB110501 DPA10401-DPB14901
KEPPYLWTGFELFPDKWTVQ

SEQ ID NO: 6422 - protein, 14 aa, synthetic construct
  source 1..14: note = Seed: PPFLWMGYELHPDK; note = HLAs: DPA10103-DPB10101 DPA10103-DPB10201 DPA10103-DPB10202 DPA10103-DPB10401 DPA10103-DPB112601 DPA10103-DPB11501 DPA10103-DPB11601 DPA10103-DPB11901 DPA10103-DPB12301 DPA10103-DPB13101 DPA10103-DPB13401 DPA10103-DPB13901 DPA10103-DPB14001 DPA10103-DPB14101 DPA10103-DPB14801 DPA10103-DPB15001 DPA10103-DPB15901 DPA10104-DPB10101 DPA10104-DPB11501 DPA10105-DPB10101 DPA10105-DPB10401 DPA10105-DPB15001 DPA10106-DPB10101 DPA10201-DPB10101 DPA10201-DPB110601 DPA10201-DPB11501 DPA10201-DPB11601 DPA10201-DPB11901 DPA10202-DPB10101 DPA10202-DPB10201 DPA10202-DPB10202 DPA10202-DPB10401 DPA10202-DPB110601 DPA10202-DPB11901 DPA10202-DPB13101 DPA10202-DPB16501 DPA10301-DPB10101 DPA10301-DPB10201 DPA10301-DPB10202 DPA10301-DPB10401 DPA10301-DPB10402 DPA10301-DPB110501 DPA10301-DPB110601 DPA10301-DPB11801 DPA10301-DPB12301 DPA10301-DPB13901 DPA10301-DPB14001 DPA10301-DPB14901 DPA10301-DPB15501 DPA10301-DPB16501 DPA10301-DPB17501 DPA10301-DPB18001 DPA10401-DPB10101 DPA10401-DPB10201; note = HLAs: DPA10401-DPB10202 DPA10401-DPB10402 DPA10401-DPB10501 DPA10401-DPB110501 DPA10401-DPB14901
PPFLWTGFELHPDK

SEQ ID NO: 6423 - protein, 20 aa, synthetic construct
  source 1..20: note = Seed: KEPPFLWMGYELHPDKWTVQ; note = HLAs: DRB1_1001 DPA10103-DPB10101 DPA10103-DPB10201 DPA10103-DPB10202 DPA10103-DPB10401 DPA10103-DPB10402 DPA10103-DPB10501 DPA10103-DPB110501 DPA10103-DPB112601 DPA10103-DPB11501 DPA10103-DPB11601 DPA10103-DPB11801 DPA10103-DPB11901 DPA10103-DPB12301 DPA10103-DPB13101 DPA10103-DPB13401 DPA10103-DPB13901 DPA10103-DPB14001 DPA10103-DPB14101 DPA10103-DPB14801 DPA10103-DPB14901 DPA10103-DPB15001 DPA10103-DPB15101 DPA10103-DPB15501 DPA10103-DPB15901 DPA10103-DPB18001 DPA10104-DPB10101 DPA10104-DPB11501 DPA10105-DPB10101 DPA10105-DPB10401 DPA10105-DPB11801 DPA10105-DPB15001 DPA10106-DPB10101 DPA10201-DPB10101 DPA10201-DPB10201 DPA10201-DPB10202 DPA10201-DPB10401 DPA10201-DPB10501 DPA10201-DPB110601 DPA10201-DPB11501 DPA10201-DPB11601 DPA10201-DPB11901 DPA10201-DPB13401 DPA10201-DPB15501 DPA10202-DPB10101 DPA10202-DPB10201 DPA10202-DPB10202 DPA10202-DPB10401 DPA10202-DPB10501 DPA10202-DPB110601 DPA10202-DPB11101 DPA10202-DPB11301 DPA10202-DPB11801 DPA10202-DPB11901 DPA10202-DPB13101; note = HLAs: DPA10202-DPB13801 DPA10202-DPB15501 DPA10202-DPB16501 DPA10301-DPB10101 DPA10301-DPB10201 DPA10301-DPB10202 DPA10301-DPB10401 DPA10301-DPB10402 DPA10301-DPB110501 DPA10301-DPB110601 DPA10301-DPB11101 DPA10301-DPB11301 DPA10301-DPB11801 DPA10301-DPB12301 DPA10301-DPB13901 DPA10301-DPB14001 DPA10301-DPB14901 DPA10301-DPB15501 DPA10301-DPB16501 DPA10301-DPB17501 DPA10301-DPB18001 DPA10401-DPB10101 DPA10401-DPB10201 DPA10401-DPB10202 DPA10401-DPB10402 DPA10401-DPB10501 DPA10401-DPB110501 DPA10401-DPB14901
KEPPFLWSGFELEPDKWTVQ

SEQ ID NO: 6424 - protein, 14 aa, synthetic construct
  source 1..14: note = Seed: PPFLWMGYELHPDK; note = HLAs: DPA10103-DPB10101 DPA10103-DPB10201 DPA10103-DPB10202 DPA10103-DPB10401 DPA10103-DPB112601 DPA10103-DPB11501 DPA10103-DPB11601 DPA10103-DPB11901 DPA10103-DPB12301 DPA10103-DPB13101 DPA10103-DPB13401 DPA10103-DPB13901 DPA10103-DPB14001 DPA10103-DPB14101 DPA10103-DPB14801 DPA10103-DPB15001 DPA10103-DPB15901 DPA10104-DPB10101 DPA10104-DPB11501 DPA10105-DPB10101 DPA10105-DPB10401 DPA10105-DPB15001 DPA10106-DPB10101 DPA10201-DPB10101 DPA10201-DPB110601 DPA10201-DPB11501 DPA10201-DPB11601 DPA10201-DPB11901 DPA10202-DPB10101 DPA10202-DPB10201 DPA10202-DPB10202 DPA10202-DPB10401 DPA10202-DPB110601 DPA10202-DPB11901 DPA10202-DPB13101 DPA10202-DPB16501 DPA10301-DPB10101 DPA10301-DPB10201 DPA10301-DPB10202 DPA10301-DPB10401 DPA10301-DPB10402 DPA10301-DPB110501 DPA10301-DPB110601 DPA10301-DPB11801 DPA10301-DPB12301 DPA10301-DPB13901 DPA10301-DPB14001 DPA10301-DPB14901 DPA10301-DPB15501 DPA10301-DPB16501 DPA10301-DPB17501 DPA10301-DPB18001 DPA10401-DPB10101 DPA10401-DPB10201; note = HLAs: DPA10401-DPB10202 DPA10401-DPB10402 DPA10401-DPB10501 DPA10401-DPB110501 DPA10401-DPB14901
PPVLWTGFELVPDK

SEQ ID NO: 6425 - protein, 14 aa, synthetic construct
  source 1..14: note = Seed: PPFLWMGYELHPDK; note = HLAs: DRB1_1001 DPA10103-DPB10101 DPA10103-DPB10201 DPA10103-DPB10202 DPA10103-DPB10401 DPA10103-DPB112601 DPA10103-DPB11501 DPA10103-DPB11601 DPA10103-DPB11901 DPA10103-DPB12301 DPA10103-DPB13101 DPA10103-DPB13401 DPA10103-DPB13901 DPA10103-DPB14001 DPA10103-DPB14101 DPA10103-DPB14801 DPA10103-DPB15001 DPA10103-DPB15901 DPA10104-DPB10101 DPA10104-DPB11501 DPA10105-DPB10101 DPA10105-DPB10401 DPA10105-DPB15001 DPA10106-DPB10101 DPA10201-DPB10101 DPA10201-DPB110601 DPA10201-DPB11501 DPA10201-DPB11601 DPA10201-DPB11901 DPA10202-DPB10101 DPA10202-DPB10201 DPA10202-DPB10202 DPA10202-DPB10401 DPA10202-DPB110601 DPA10202-DPB11901 DPA10202-DPB13101 DPA10202-DPB16501 DPA10301-DPB10101 DPA10301-DPB10201 DPA10301-DPB10202 DPA10301-DPB10401 DPA10301-DPB10402 DPA10301-DPB110501 DPA10301-DPB110601 DPA10301-DPB11801 DPA10301-DPB12301 DPA10301-DPB13901 DPA10301-DPB14001 DPA10301-DPB14901 DPA10301-DPB15501 DPA10301-DPB16501 DPA10301-DPB17501 DPA10301-DPB18001 DPA10401-DPB10101 DPA10401-DPB10201; note = HLAs: DPA10401-DPB10202 DPA10401-DPB10402 DPA10401-DPB10501 DPA10401-DPB110501 DPA10401-DPB14901
PPFLWCGFELVPDK

SEQ ID NO: 6426 - protein, 20 aa, synthetic construct
  source 1..20: note = Seed: KEPPFLWMGYELHPDKWTVQ; note = HLAs: DRB1_0101 DPA10103-DPB10101 DPA10103-DPB10201 DPA10103-DPB10202 DPA10103-DPB10401 DPA10103-DPB10402 DPA10103-DPB10501 DPA10103-DPB110501 DPA10103-DPB112601 DPA10103-DPB11501 DPA10103-DPB11601 DPA10103-DPB11801 DPA10103-DPB11901 DPA10103-DPB12301 DPA10103-DPB13101 DPA10103-DPB13401 DPA10103-DPB13901 DPA10103-DPB14001 DPA10103-DPB14101 DPA10103-DPB14801 DPA10103-DPB14901 DPA10103-DPB15001 DPA10103-DPB15101 DPA10103-DPB15501 DPA10103-DPB15901 DPA10103-DPB18001 DPA10104-DPB10101 DPA10104-DPB11501 DPA10105-DPB10101 DPA10105-DPB10401 DPA10105-DPB11801 DPA10105-DPB15001 DPA10106-DPB10101 DPA10201-DPB10101 DPA10201-DPB10201 DPA10201-DPB10202 DPA10201-DPB10401 DPA10201-DPB10501 DPA10201-DPB110601 DPA10201-DPB11501 DPA10201-DPB11601 DPA10201-DPB11901 DPA10201-DPB13401 DPA10201-DPB15501 DPA10202-DPB10101 DPA10202-DPB10201 DPA10202-DPB10202 DPA10202-DPB10401 DPA10202-DPB10501 DPA10202-DPB110601 DPA10202-DPB11101 DPA10202-DPB11301 DPA10202-DPB11801 DPA10202-DPB11901 DPA10202-DPB13101; note = HLAs: DPA10202-DPB13801 DPA10202-DPB15501 DPA10202-DPB16501 DPA10301-DPB10101 DPA10301-DPB10201 DPA10301-DPB10202 DPA10301-DPB10401 DPA10301-DPB10402 DPA10301-DPB110501 DPA10301-DPB110601 DPA10301-DPB11101 DPA10301-DPB11301 DPA10301-DPB11801 DPA10301-DPB12301 DPA10301-DPB13901 DPA10301-DPB14001 DPA10301-DPB14901 DPA10301-DPB15501 DPA10301-DPB16501 DPA10301-DPB17501 DPA10301-DPB18001 DPA10401-DPB10101 DPA10401-DPB10201 DPA10401-DPB10202 DPA10401-DPB10402 DPA10401-DPB10501 DPA10401-DPB110501 DPA10401-DPB14901
KEPPFLWMGFELLPDKWTVQ

SEQ ID NO: 6427 - protein, 14 aa, synthetic construct
  source 1..14: note = Seed: PPFLWMGYELHPDK; note = HLAs: DPA10103-DPB10101 DPA10103-DPB10201 DPA10103-DPB10202 DPA10103-DPB10401 DPA10103-DPB112601 DPA10103-DPB11501 DPA10103-DPB11601 DPA10103-DPB11901 DPA10103-DPB12301 DPA10103-DPB13101 DPA10103-DPB13401 DPA10103-DPB13901 DPA10103-DPB14001 DPA10103-DPB14101 DPA10103-DPB14801 DPA10103-DPB15001 DPA10103-DPB15901 DPA10104-DPB10101 DPA10104-DPB11501 DPA10105-DPB10101 DPA10105-DPB10401 DPA10105-DPB15001 DPA10106-DPB10101 DPA10201-DPB10101 DPA10201-DPB110601 DPA10201-DPB11501 DPA10201-DPB11601 DPA10201-DPB11901 DPA10202-DPB10101 DPA10202-DPB10201 DPA10202-DPB10202 DPA10202-DPB10401 DPA10202-DPB110601 DPA10202-DPB11901 DPA10202-DPB13101 DPA10202-DPB16501 DPA10301-DPB10101 DPA10301-DPB10201 DPA10301-DPB10202 DPA10301-DPB10401 DPA10301-DPB10402 DPA10301-DPB110501 DPA10301-DPB110601 DPA10301-DPB11801 DPA10301-DPB12301 DPA10301-DPB13901 DPA10301-DPB14001 DPA10301-DPB14901 DPA10301-DPB16501 DPA10301-DPB17501 DPA10301-DPB18001 DPA10401-DPB10101 DPA10401-DPB10201 DPA10401-DPB10202; note = HLAs: DPA10401-DPB10402 DPA10401-DPB10501 DPA10401-DPB110501 DPA10401-DPB14901
PPLLWQGFELLPDK

SEQ ID NO: 6428 - protein, 14 aa, synthetic construct
  source 1..14: note = Seed: PPFLWMGYELHPDK; note = HLAs: DPA10103-DPB10101 DPA10103-DPB10201 DPA10103-DPB10202 DPA10103-DPB10401 DPA10103-DPB112601 DPA10103-DPB11501 DPA10103-DPB11601 DPA10103-DPB11901 DPA10103-DPB12301 DPA10103-DPB13101 DPA10103-DPB13401 DPA10103-DPB13901 DPA10103-DPB14001 DPA10103-DPB14101 DPA10103-DPB14801 DPA10103-DPB15001 DPA10103-DPB15901 DPA10104-DPB10101 DPA10104-DPB11501 DPA10105-DPB10101 DPA10105-DPB10401 DPA10105-DPB15001 DPA10106-DPB10101 DPA10201-DPB10101 DPA10201-DPB110601 DPA10201-DPB11501 DPA10201-DPB11601 DPA10201-DPB11901 DPA10202-DPB10101 DPA10202-DPB10201 DPA10202-DPB10202 DPA10202-DPB10401 DPA10202-DPB110601 DPA10202-DPB11901 DPA10202-DPB13101 DPA10202-DPB16501 DPA10301-DPB10101 DPA10301-DPB10201 DPA10301-DPB10202 DPA10301-DPB10401 DPA10301-DPB10402 DPA10301-DPB110501 DPA10301-DPB110601 DPA10301-DPB11801 DPA10301-DPB12301 DPA10301-DPB13901 DPA10301-DPB14001 DPA10301-DPB14901 DPA10301-DPB15501 DPA10301-DPB16501 DPA10301-DPB17501 DPA10301-DPB18001 DPA10401-DPB10101 DPA10401-DPB10201; note = HLAs: DPA10401-DPB10202 DPA10401-DPB10402 DPA10401-DPB10501 DPA10401-DPB110501 DPA10401-DPB14901
PPFLWKGFELFPDK

SEQ ID NO: 6429 - protein, 20 aa, synthetic construct
  source 1..20: note = Seed: KEPPFLWMGYELHPDKWTVQ; note = HLAs: DRB1_0101 DPA10103-DPB10101 DPA10103-DPB10201 DPA10103-DPB10202 DPA10103-DPB10401 DPA10103-DPB10402 DPA10103-DPB10501 DPA10103-DPB110501 DPA10103-DPB112601 DPA10103-DPB11501 DPA10103-DPB11601 DPA10103-DPB11801 DPA10103-DPB11901 DPA10103-DPB12301 DPA10103-DPB13101 DPA10103-DPB13401 DPA10103-DPB13901 DPA10103-DPB14001 DPA10103-DPB14101 DPA10103-DPB14801 DPA10103-DPB14901 DPA10103-DPB15001 DPA10103-DPB15101 DPA10103-DPB15501 DPA10103-DPB15901 DPA10103-DPB18001 DPA10104-DPB10101 DPA10104-DPB11501 DPA10105-DPB10101 DPA10105-DPB10401 DPA10105-DPB11801 DPA10105-DPB15001 DPA10106-DPB10101 DPA10201-DPB10101 DPA10201-DPB10201 DPA10201-DPB10202 DPA10201-DPB10401 DPA10201-DPB10501 DPA10201-DPB110601 DPA10201-DPB11501 DPA10201-DPB11601 DPA10201-DPB11901 DPA10201-DPB13401 DPA10201-DPB15501 DPA10202-DPB10101 DPA10202-DPB10201 DPA10202-DPB10202 DPA10202-DPB10401 DPA10202-DPB10501 DPA10202-DPB110601 DPA10202-DPB11101 DPA10202-DPB11301 DPA10202-DPB11801 DPA10202-DPB11901 DPA10202-DPB13101; note = HLAs: DPA10202-DPB13801 DPA10202-DPB15501 DPA10202-DPB16501 DPA10301-DPB10101 DPA10301-DPB10201 DPA10301-DPB10202 DPA10301-DPB10401 DPA10301-DPB10402 DPA10301-DPB110501 DPA10301-DPB110601 DPA10301-DPB11101 DPA10301-DPB11301 DPA10301-DPB11801 DPA10301-DPB12301 DPA10301-DPB13901 DPA10301-DPB14001 DPA10301-DPB14901 DPA10301-DPB15501 DPA10301-DPB16501 DPA10301-DPB17501 DPA10301-DPB18001 DPA10401-DPB10101 DPA10401-DPB10201 DPA10401-DPB10202 DPA10401-DPB10402 DPA10401-DPB10501 DPA10401-DPB110501 DPA10401-DPB14901
KEPPFLWNGFELAPDKWTVQ

SEQ ID NO: 6430 - protein, 20 aa, synthetic construct
  source 1..20: note = Seed: KEPPFLWMGYELHPDKWTVQ; note = HLAs: DPA10103-DPB10101 DPA10103-DPB10201 DPA10103-DPB10202 DPA10103-DPB10401 DPA10103-DPB10402 DPA10103-DPB10501 DPA10103-DPB110501 DPA10103-DPB112601 DPA10103-DPB11501 DPA10103-DPB11601 DPA10103-DPB11801 DPA10103-DPB11901 DPA10103-DPB12301 DPA10103-DPB13101 DPA10103-DPB13401 DPA10103-DPB13901 DPA10103-DPB14001 DPA10103-DPB14101 DPA10103-DPB14801 DPA10103-DPB14901 DPA10103-DPB15001 DPA10103-DPB15101 DPA10103-DPB15501 DPA10103-DPB15901 DPA10103-DPB18001 DPA10104-DPB10101 DPA10104-DPB11501 DPA10105-DPB10101 DPA10105-DPB10401 DPA10105-DPB11801 DPA10105-DPB15001 DPA10106-DPB10101 DPA10201-DPB10101 DPA10201-DPB10201 DPA10201-DPB10202 DPA10201-DPB10401 DPA10201-DPB10501 DPA10201-DPB110601 DPA10201-DPB11501 DPA10201-DPB11601 DPA10201-DPB11901 DPA10201-DPB13401 DPA10201-DPB15501 DPA10202-DPB10101 DPA10202-DPB10201 DPA10202-DPB10202 DPA10202-DPB10401 DPA10202-DPB10501 DPA10202-DPB110601 DPA10202-DPB11101 DPA10202-DPB11301 DPA10202-DPB11801 DPA10202-DPB11901 DPA10202-DPB13101 DPA10202-DPB13801; note = HLAs: DPA10202-DPB15501 DPA10202-DPB16501 DPA10301-DPB10101 DPA10301-DPB10201 DPA10301-DPB10202 DPA10301-DPB10401 DPA10301-DPB10402 DPA10301-DPB110501 DPA10301-DPB110601 DPA10301-DPB11101 DPA10301-DPB11301 DPA10301-DPB11801 DPA10301-DPB12301 DPA10301-DPB13901 DPA10301-DPB14001 DPA10301-DPB14901 DPA10301-DPB15501 DPA10301-DPB16501 DPA10301-DPB17501 DPA10301-DPB18001 DPA10401-DPB10101 DPA10401-DPB10201 DPA10401-DPB10202 DPA10401-DPB10402 DPA10401-DPB10501 DPA10401-DPB110501 DPA10401-DPB14901
KEPPWLWHGFELLPDKWTVQ

SEQ ID NO: 6431 - protein, 14 aa, synthetic construct
  source 1..14: note = Seed: PPFLWMGYELHPDK; note = HLAs: DPA10103-DPB10101 DPA10103-DPB10201 DPA10103-DPB10202 DPA10103-DPB10401 DPA10103-DPB112601 DPA10103-DPB11501 DPA10103-DPB11601 DPA10103-DPB11901 DPA10103-DPB12301 DPA10103-DPB13101 DPA10103-DPB13401 DPA10103-DPB13901 DPA10103-DPB14001 DPA10103-DPB14101 DPA10103-DPB14801 DPA10103-DPB15001 DPA10103-DPB15901 DPA10104-DPB10101 DPA10104-DPB11501 DPA10105-DPB10101 DPA10105-DPB10401 DPA10105-DPB15001 DPA10106-DPB10101 DPA10201-DPB10101 DPA10201-DPB110601 DPA10201-DPB11501 DPA10201-DPB11601 DPA10201-DPB11901 DPA10202-DPB10101 DPA10202-DPB10201 DPA10202-DPB10202 DPA10202-DPB10401 DPA10202-DPB110601 DPA10202-DPB11901 DPA10202-DPB13101 DPA10202-DPB16501 DPA10301-DPB10101 DPA10301-DPB10201 DPA10301-DPB10202 DPA10301-DPB10401 DPA10301-DPB10402 DPA10301-DPB110501 DPA10301-DPB110601 DPA10301-DPB11801 DPA10301-DPB12301 DPA10301-DPB13901 DPA10301-DPB14001 DPA10301-DPB14901 DPA10301-DPB15501 DPA10301-DPB16501 DPA10301-DPB17501 DPA10301-DPB18001 DPA10401-DPB10101 DPA10401-DPB10201; note = HLAs: DPA10401-DPB10202 DPA10401-DPB10402 DPA10401-DPB10501 DPA10401-DPB110501 DPA10401-DPB14901
PPFLWEGYELVPDK

SEQ ID NO: 6432 - protein, 20 aa, synthetic construct
  source 1..20: note = Seed: KEPPFLWMGYELHPDKWTVQ; note = HLAs: DRB1_0101 DPA10103-DPB10101 DPA10103-DPB10201 DPA10103-DPB10202 DPA10103-DPB10401 DPA10103-DPB10402 DPA10103-DPB10501 DPA10103-DPB110501 DPA10103-DPB112601 DPA10103-DPB11501 DPA10103-DPB11601 DPA10103-DPB11801 DPA10103-DPB11901 DPA10103-DPB12301 DPA10103-DPB13101 DPA10103-DPB13401 DPA10103-DPB13901 DPA10103-DPB14001 DPA10103-DPB14101 DPA10103-DPB14801 DPA10103-DPB14901 DPA10103-DPB15001 DPA10103-DPB15101 DPA10103-DPB15501 DPA10103-DPB15901 DPA10103-DPB18001 DPA10104-DPB10101 DPA10104-DPB11501 DPA10105-DPB10101 DPA10105-DPB10401 DPA10105-DPB11801 DPA10105-DPB15001 DPA10106-DPB10101 DPA10201-DPB10101 DPA10201-DPB10201 DPA10201-DPB10202 DPA10201-DPB10401 DPA10201-DPB10501 DPA10201-DPB110601 DPA10201-DPB11501 DPA10201-DPB11601 DPA10201-DPB11901 DPA10201-DPB13401 DPA10201-DPB15501 DPA10202-DPB10101 DPA10202-DPB10201 DPA10202-DPB10202 DPA10202-DPB10401 DPA10202-DPB10501 DPA10202-DPB110601 DPA10202-DPB11101 DPA10202-DPB11301 DPA10202-DPB11801 DPA10202-DPB11901 DPA10202-DPB13101; note = HLAs: DPA10202-DPB13801 DPA10202-DPB15501 DPA10202-DPB16501 DPA10301-DPB10101 DPA10301-DPB10201 DPA10301-DPB10202 DPA10301-DPB10401 DPA10301-DPB10402 DPA10301-DPB110501 DPA10301-DPB110601 DPA10301-DPB11101 DPA10301-DPB11301 DPA10301-DPB11801 DPA10301-DPB12301 DPA10301-DPB13901 DPA10301-DPB14001 DPA10301-DPB14901 DPA10301-DPB15501 DPA10301-DPB16501 DPA10301-DPB17501 DPA10301-DPB18001 DPA10401-DPB10101 DPA10401-DPB10201 DPA10401-DPB10202 DPA10401-DPB10402 DPA10401-DPB10501 DPA10401-DPB110501 DPA10401-DPB14901
KEPPYLWNGFELLPDKWTVQ

SEQ ID NO: 6433 - protein, 20 aa, synthetic construct
  source 1..20: note = Seed: KEPPFLWMGYELHPDKWTVQ; note = HLAs: DRB1_0101 DPA10103-DPB10101 DPA10103-DPB10201 DPA10103-DPB10202 DPA10103-DPB10401 DPA10103-DPB10402 DPA10103-DPB10501 DPA10103-DPB110501 DPA10103-DPB112601 DPA10103-DPB11501 DPA10103-DPB11601 DPA10103-DPB11801 DPA10103-DPB11901 DPA10103-DPB12301 DPA10103-DPB13101 DPA10103-DPB13401 DPA10103-DPB13901 DPA10103-DPB14001 DPA10103-DPB14101 DPA10103-DPB14801 DPA10103-DPB14901 DPA10103-DPB15001 DPA10103-DPB15101 DPA10103-DPB15501 DPA10103-DPB15901 DPA10103-DPB18001 DPA10104-DPB10101 DPA10104-DPB11501 DPA10105-DPB10101 DPA10105-DPB10401 DPA10105-DPB11801 DPA10105-DPB15001 DPA10106-DPB10101 DPA10201-DPB10101 DPA10201-DPB10201 DPA10201-DPB10202 DPA10201-DPB10401 DPA10201-DPB10501 DPA10201-DPB110601 DPA10201-DPB11501 DPA10201-DPB11601 DPA10201-DPB11901 DPA10201-DPB13401 DPA10201-DPB15501 DPA10202-DPB10101 DPA10202-DPB10201 DPA10202-DPB10202 DPA10202-DPB10401 DPA10202-DPB10501 DPA10202-DPB110601 DPA10202-DPB11101 DPA10202-DPB11301 DPA10202-DPB11801 DPA10202-DPB11901 DPA10202-DPB13101; note = HLAs: DPA10202-DPB13801 DPA10202-DPB15501 DPA10202-DPB16501 DPA10301-DPB10101 DPA10301-DPB10201 DPA10301-DPB10202 DPA10301-DPB10401 DPA10301-DPB10402 DPA10301-DPB110501 DPA10301-DPB110601 DPA10301-DPB11101 DPA10301-DPB11301 DPA10301-DPB11801 DPA10301-DPB12301 DPA10301-DPB13901 DPA10301-DPB14001 DPA10301-DPB14901 DPA10301-DPB15501 DPA10301-DPB16501 DPA10301-DPB17501 DPA10301-DPB18001 DPA10401-DPB10101 DPA10401-DPB10201 DPA10401-DPB10202 DPA10401-DPB10402 DPA10401-DPB10501 DPA10401-DPB110501 DPA10401-DPB14901
KEPPFLWEGYELVPDKWTVQ

SEQ ID NO: 6434 - protein, 20 aa, synthetic construct
  source 1..20: note = Seed: KEPPFLWMGYELHPDKWTVQ; note = HLAs: DRB1_0101 DPA10103-DPB10101 DPA10103-DPB10201 DPA10103-DPB10202 DPA10103-DPB10401 DPA10103-DPB10402 DPA10103-DPB10501 DPA10103-DPB110501 DPA10103-DPB112601 DPA10103-DPB11501 DPA10103-DPB11601 DPA10103-DPB11801 DPA10103-DPB11901 DPA10103-DPB12301 DPA10103-DPB13101 DPA10103-DPB13401 DPA10103-DPB13901 DPA10103-DPB14001 DPA10103-DPB14101 DPA10103-DPB14801 DPA10103-DPB14901 DPA10103-DPB15001 DPA10103-DPB15101 DPA10103-DPB15501 DPA10103-DPB15901 DPA10103-DPB18001 DPA10104-DPB10101 DPA10104-DPB11501 DPA10105-DPB10101 DPA10105-DPB10401 DPA10105-DPB11801 DPA10105-DPB15001 DPA10106-DPB10101 DPA10201-DPB10101 DPA10201-DPB10201 DPA10201-DPB10202 DPA10201-DPB10401 DPA10201-DPB10501 DPA10201-DPB110601 DPA10201-DPB11501 DPA10201-DPB11601 DPA10201-DPB11901 DPA10201-DPB13401 DPA10201-DPB15501 DPA10202-DPB10101 DPA10202-DPB10201 DPA10202-DPB10202 DPA10202-DPB10401 DPA10202-DPB10501 DPA10202-DPB110601 DPA10202-DPB11101 DPA10202-DPB11301 DPA10202-DPB11801 DPA10202-DPB11901 DPA10202-DPB13101; note = HLAs: DPA10202-DPB13801 DPA10202-DPB15501 DPA10202-DPB16501 DPA10301-DPB10101 DPA10301-DPB10201 DPA10301-DPB10202 DPA10301-DPB10401 DPA10301-DPB10402 DPA10301-DPB110501 DPA10301-DPB110601 DPA10301-DPB11101 DPA10301-DPB11301 DPA10301-DPB11801 DPA10301-DPB12301 DPA10301-DPB13901 DPA10301-DPB14001 DPA10301-DPB14901 DPA10301-DPB15501 DPA10301-DPB16501 DPA10301-DPB17501 DPA10301-DPB18001 DPA10401-DPB10101 DPA10401-DPB10201 DPA10401-DPB10202 DPA10401-DPB10402 DPA10401-DPB10501 DPA10401-DPB110501 DPA10401-DPB14901
KEPPYLWQGFELLPDKWTVQ

SEQ ID NO: 6435 - protein, 14 aa, synthetic construct
  source 1..14: note = Seed: PPFLWMGYELHPDK; note = HLAs: DPA10103-DPB10101 DPA10103-DPB10201 DPA10103-DPB10202 DPA10103-DPB10401 DPA10103-DPB112601 DPA10103-DPB11501 DPA10103-DPB11601 DPA10103-DPB11901 DPA10103-DPB12301 DPA10103-DPB13101 DPA10103-DPB13401 DPA10103-DPB13901 DPA10103-DPB14001 DPA10103-DPB14101 DPA10103-DPB14801 DPA10103-DPB15001 DPA10103-DPB15901 DPA10104-DPB10101 DPA10104-DPB11501 DPA10105-DPB10101 DPA10105-DPB10401 DPA10105-DPB15001 DPA10106-DPB10101 DPA10201-DPB10101 DPA10201-DPB110601 DPA10201-DPB11501 DPA10201-DPB11601 DPA10201-DPB11901 DPA10202-DPB10101 DPA10202-DPB10201 DPA10202-DPB10202 DPA10202-DPB10401 DPA10202-DPB110601 DPA10202-DPB11901 DPA10202-DPB13101 DPA10202-DPB16501 DPA10301-DPB10101 DPA10301-DPB10201 DPA10301-DPB10202 DPA10301-DPB10401 DPA10301-DPB10402 DPA10301-DPB110501 DPA10301-DPB110601 DPA10301-DPB11801 DPA10301-DPB12301 DPA10301-DPB13901 DPA10301-DPB14001 DPA10301-DPB14901 DPA10301-DPB15501 DPA10301-DPB16501 DPA10301-DPB17501 DPA10301-DPB18001 DPA10401-DPB10101 DPA10401-DPB10201; note = HLAs: DPA10401-DPB10202 DPA10401-DPB10402 DPA10401-DPB10501 DPA10401-DPB110501 DPA10401-DPB14901
PPFLWHGFELSPDK

SEQ ID NO: 6436 - protein, 14 aa, synthetic construct
  source 1..14: note = Seed: PPFLWMGYELHPDK; note = HLAs: DRB1_1001 DPA10103-DPB10101 DPA10103-DPB10201 DPA10103-DPB10202 DPA10103-DPB10401 DPA10103-DPB112601 DPA10103-DPB11501 DPA10103-DPB11601 DPA10103-DPB11901 DPA10103-DPB12301 DPA10103-DPB13101 DPA10103-DPB13401 DPA10103-DPB13901 DPA10103-DPB14001 DPA10103-DPB14101 DPA10103-DPB14801 DPA10103-DPB15001 DPA10103-DPB15901 DPA10104-DPB10101 DPA10104-DPB11501 DPA10105-DPB10101 DPA10105-DPB10401 DPA10105-DPB15001 DPA10106-DPB10101 DPA10201-DPB10101 DPA10201-DPB110601 DPA10201-DPB11501 DPA10201-DPB11601 DPA10201-DPB11901 DPA10202-DPB10101 DPA10202-DPB10201 DPA10202-DPB10202 DPA10202-DPB10401 DPA10202-DPB110601 DPA10202-DPB11901 DPA10202-DPB13101 DPA10202-DPB16501 DPA10301-DPB10101 DPA10301-DPB10201 DPA10301-DPB10202 DPA10301-DPB10401 DPA10301-DPB10402 DPA10301-DPB110501 DPA10301-DPB110601 DPA10301-DPB11801 DPA10301-DPB12301 DPA10301-DPB13901 DPA10301-DPB14001 DPA10301-DPB14901 DPA10301-DPB15501 DPA10301-DPB16501 DPA10301-DPB17501 DPA10301-DPB18001 DPA10401-DPB10101 DPA10401-DPB10201; note = HLAs: DPA10401-DPB10202 DPA10401-DPB10402 DPA10401-DPB10501 DPA10401-DPB110501 DPA10401-DPB14901
PPYLWQGFELIPDK

SEQ ID NO: 6437 - protein, 20 aa, synthetic construct
  source 1..20: note = Seed: KEPPFLWMGYELHPDKWTVQ; note = HLAs: DRB1_0101 DPA10103-DPB10101 DPA10103-DPB10201 DPA10103-DPB10202 DPA10103-DPB10401 DPA10103-DPB10402 DPA10103-DPB10501 DPA10103-DPB110501 DPA10103-DPB112601 DPA10103-DPB11501 DPA10103-DPB11601 DPA10103-DPB11801 DPA10103-DPB11901 DPA10103-DPB12301 DPA10103-DPB13101 DPA10103-DPB13401 DPA10103-DPB13901 DPA10103-DPB14001 DPA10103-DPB14101 DPA10103-DPB14801 DPA10103-DPB14901 DPA10103-DPB15001 DPA10103-DPB15101 DPA10103-DPB15501 DPA10103-DPB15901 DPA10103-DPB18001 DPA10104-DPB10101 DPA10104-DPB11501 DPA10105-DPB10101 DPA10105-DPB10401 DPA10105-DPB11801 DPA10105-DPB15001 DPA10106-DPB10101 DPA10201-DPB10101 DPA10201-DPB10201 DPA10201-DPB10202 DPA10201-DPB10401 DPA10201-DPB10501 DPA10201-DPB110601 DPA10201-DPB11501 DPA10201-DPB11601 DPA10201-DPB11901 DPA10201-DPB13401 DPA10201-DPB15501 DPA10202-DPB10101 DPA10202-DPB10201 DPA10202-DPB10202 DPA10202-DPB10401 DPA10202-DPB10501 DPA10202-DPB110601 DPA10202-DPB11101 DPA10202-DPB11301 DPA10202-DPB11801 DPA10202-DPB11901 DPA10202-DPB13101; note = HLAs: DPA10202-DPB13801 DPA10202-DPB15501 DPA10202-DPB16501 DPA10301-DPB10101 DPA10301-DPB10201 DPA10301-DPB10202 DPA10301-DPB10401 DPA10301-DPB10402 DPA10301-DPB110501 DPA10301-DPB110601 DPA10301-DPB11101 DPA10301-DPB11301 DPA10301-DPB11801 DPA10301-DPB12301 DPA10301-DPB13901 DPA10301-DPB14001 DPA10301-DPB14901 DPA10301-DPB15501 DPA10301-DPB16501 DPA10301-DPB17501 DPA10301-DPB18001 DPA10401-DPB10101 DPA10401-DPB10201 DPA10401-DPB10202 DPA10401-DPB10402 DPA10401-DPB10501 DPA10401-DPB110501 DPA10401-DPB14901
KEPPFLWDGFELIPDKWTVQ

SEQ ID NO: 6438 - protein, 20 aa, synthetic construct
  source 1..20: note = Seed: KEPPFLWMGYELHPDKWTVQ; note = HLAs: DPA10103-DPB10101 DPA10103-DPB10201 DPA10103-DPB10202 DPA10103-DPB10401 DPA10103-DPB10402 DPA10103-DPB10501 DPA10103-DPB110501 DPA10103-DPB112601 DPA10103-DPB11501 DPA10103-DPB11601 DPA10103-DPB11801 DPA10103-DPB11901 DPA10103-DPB12301 DPA10103-DPB13101 DPA10103-DPB13401 DPA10103-DPB13901 DPA10103-DPB14001 DPA10103-DPB14101 DPA10103-DPB14801 DPA10103-DPB14901 DPA10103-DPB15001 DPA10103-DPB15101 DPA10103-DPB15501 DPA10103-DPB15901 DPA10103-DPB18001 DPA10104-DPB10101 DPA10104-DPB11501 DPA10105-DPB10101 DPA10105-DPB10401 DPA10105-DPB11801 DPA10105-DPB15001 DPA10106-DPB10101 DPA10201-DPB10101 DPA10201-DPB10201 DPA10201-DPB10202 DPA10201-DPB10401 DPA10201-DPB10501 DPA10201-DPB110601 DPA10201-DPB11501 DPA10201-DPB11601 DPA10201-DPB11901 DPA10201-DPB13401 DPA10201-DPB15501 DPA10202-DPB10101 DPA10202-DPB10201 DPA10202-DPB10202 DPA10202-DPB10401 DPA10202-DPB10501 DPA10202-DPB110601 DPA10202-DPB11101 DPA10202-DPB11301 DPA10202-DPB11801 DPA10202-DPB11901 DPA10202-DPB13101 DPA10202-DPB13801; note = HLAs: DPA10202-DPB15501 DPA10202-DPB16501 DPA10301-DPB10101 DPA10301-DPB10201 DPA10301-DPB10202 DPA10301-DPB10401 DPA10301-DPB10402 DPA10301-DPB110501 DPA10301-DPB110601 DPA10301-DPB11301 DPA10301-DPB11801 DPA10301-DPB12301 DPA10301-DPB13901 DPA10301-DPB14001 DPA10301-DPB14901 DPA10301-DPB15501 DPA10301-DPB16501 DPA10301-DPB17501 DPA10301-DPB18001 DPA10401-DPB10101 DPA10401-DPB10201 DPA10401-DPB10202 DPA10401-DPB10402 DPA10401-DPB10501 DPA10401-DPB110501 DPA10401-DPB14901
KEPPILWHGFELLPDKWTVQ

SEQ ID NO: 6439 - protein, 20 aa, synthetic construct
  source 1..20: note = Seed: KEPPFLWMGYELHPDKWTVQ; note = HLAs: DPA10103-DPB10101 DPA10103-DPB10201 DPA10103-DPB10202 DPA10103-DPB10401 DPA10103-DPB10402 DPA10103-DPB10501 DPA10103-DPB110501 DPA10103-DPB112601 DPA10103-DPB11501 DPA10103-DPB11601 DPA10103-DPB11801 DPA10103-DPB11901 DPA10103-DPB12301 DPA10103-DPB13101 DPA10103-DPB13401 DPA10103-DPB13901 DPA10103-DPB14001 DPA10103-DPB14101 DPA10103-DPB14801 DPA10103-DPB14901 DPA10103-DPB15001 DPA10103-DPB15101 DPA10103-DPB15501 DPA10103-DPB15901 DPA10103-DPB18001 DPA10104-DPB10101 DPA10104-DPB11501 DPA10105-DPB10101 DPA10105-DPB10401 DPA10105-DPB11801 DPA10105-DPB15001 DPA10106-DPB10101 DPA10201-DPB10101 DPA10201-DPB10201 DPA10201-DPB10202 DPA10201-DPB10401 DPA10201-DPB10501 DPA10201-DPB110601 DPA10201-DPB11501 DPA10201-DPB11601 DPA10201-DPB11901 DPA10201-DPB13401 DPA10201-DPB15501 DPA10202-DPB10101 DPA10202-DPB10201 DPA10202-DPB10202 DPA10202-DPB10401 DPA10202-DPB10501 DPA10202-DPB110601 DPA10202-DPB11101 DPA10202-DPB11301 DPA10202-DPB11801 DPA10202-DPB11901 DPA10202-DPB13101 DPA10202-DPB13801; note = HLAs: DPA10202-DPB15501 DPA10202-DPB16501 DPA10301-DPB10101 DPA10301-DPB10201 DPA10301-DPB10202 DPA10301-DPB10401 DPA10301-DPB10402 DPA10301-DPB110501 DPA10301-DPB110601 DPA10301-DPB11301 DPA10301-DPB11801 DPA10301-DPB12301 DPA10301-DPB13901 DPA10301-DPB14001 DPA10301-DPB14901 DPA10301-DPB15501 DPA10301-DPB16501 DPA10301-DPB17501 DPA10301-DPB18001 DPA10401-DPB10101 DPA10401-DPB10201 DPA10401-DPB10202 DPA10401-DPB10402 DPA10401-DPB10501 DPA10401-DPB110501 DPA10401-DPB14901
KEPPFLWHGLELLPDKWTVQ

SEQ ID NO: 6440 - protein, 20 aa, synthetic construct
  source 1..20: note = Seed: KEPPFLWMGYELHPDKWTVQ; note = HLAs: DRB1_0101 DRB1_1001 DPA10103-DPB10101 DPA10103-DPB10201 DPA10103-DPB10202 DPA10103-DPB10401 DPA10103-DPB10402 DPA10103-DPB10501 DPA10103-DPB110501 DPA10103-DPB112601 DPA10103-DPB11501 DPA10103-DPB11601 DPA10103-DPB11801 DPA10103-DPB11901 DPA10103-DPB12301 DPA10103-DPB13101 DPA10103-DPB13401 DPA10103-DPB13901 DPA10103-DPB14001 DPA10103-DPB14101 DPA10103-DPB14801 DPA10103-DPB14901 DPA10103-DPB15001 DPA10103-DPB15101 DPA10103-DPB15501 DPA10103-DPB15901 DPA10103-DPB18001 DPA10104-DPB10101 DPA10104-DPB11501 DPA10105-DPB10101 DPA10105-DPB10401 DPA10105-DPB11801 DPA10105-DPB15001 DPA10106-DPB10101 DPA10201-DPB10101 DPA10201-DPB10201 DPA10201-DPB10202 DPA10201-DPB10401 DPA10201-DPB10501 DPA10201-DPB110601 DPA10201-DPB11501 DPA10201-DPB11601 DPA10201-DPB11901 DPA10201-DPB13401 DPA10201-DPB15501 DPA10202-DPB10101 DPA10202-DPB10201 DPA10202-DPB10202 DPA10202-DPB10401 DPA10202-DPB10501 DPA10202-DPB110601 DPA10202-DPB11101 DPA10202-DPB11301 DPA10202-DPB11801 DPA10202-DPB11901; note = HLAs: DPA10202-DPB13101 DPA10202-DPB13801 DPA10202-DPB15501 DPA10202-DPB16501 DPA10301-DPB10101 DPA10301-DPB10201 DPA10301-DPB10202 DPA10301-DPB10401 DPA10301-DPB10402 DPA10301-DPB110501 DPA10301-DPB110601 DPA10301-DPB11101 DPA10301-DPB11301 DPA10301-DPB11801 DPA10301-DPB12301 DPA10301-DPB13901 DPA10301-DPB14001 DPA10301-DPB14901 DPA10301-DPB15501 DPA10301-DPB16501 DPA10301-DPB17501 DPA10301-DPB18001 DPA10401-DPB10101 DPA10401-DPB10201 DPA10401-DPB10202 DPA10401-DPB10402 DPA10401-DPB10501 DPA10401-DPB110501 DPA10401-DPB14901
KEPPYLWTGFELAPDKWTVQ

SEQ ID NO: 6441 - protein, 20 aa, synthetic construct
  source 1..20: note = Seed: KEPPFLWMGYELHPDKWTVQ; note = HLAs: DRB1_0101 DPA10103-DPB10101 DPA10103-DPB10201 DPA10103-DPB10202 DPA10103-DPB10401 DPA10103-DPB10402 DPA10103-DPB10501 DPA10103-DPB110501 DPA10103-DPB112601 DPA10103-DPB11501 DPA10103-DPB11601 DPA10103-DPB11801 DPA10103-DPB11901 DPA10103-DPB12301 DPA10103-DPB13101 DPA10103-DPB13401 DPA10103-DPB13901 DPA10103-DPB14001 DPA10103-DPB14101 DPA10103-DPB14801 DPA10103-DPB14901 DPA10103-DPB15001 DPA10103-DPB15101 DPA10103-DPB15501 DPA10103-DPB15901 DPA10103-DPB18001 DPA10104-DPB10101 DPA10104-DPB11501 DPA10105-DPB10101 DPA10105-DPB10401 DPA10105-DPB11801 DPA10105-DPB15001 DPA10106-DPB10101 DPA10201-DPB10101 DPA10201-DPB10201 DPA10201-DPB10202 DPA10201-DPB10401 DPA10201-DPB10501 DPA10201-DPB110601 DPA10201-DPB11501 DPA10201-DPB11601 DPA10201-DPB11901 DPA10201-DPB13401 DPA10201-DPB15501 DPA10202-DPB10101 DPA10202-DPB10201 DPA10202-DPB10202 DPA10202-DPB10401 DPA10202-DPB10501 DPA10202-DPB110601 DPA10202-DPB11101 DPA10202-DPB11301 DPA10202-DPB11801 DPA10202-DPB11901 DPA10202-DPB13101; note = HLAs: DPA10202-DPB13801 DPA10202-DPB15501 DPA10202-DPB16501 DPA10301-DPB10101 DPA10301-DPB10201 DPA10301-DPB10202 DPA10301-DPB10401 DPA10301-DPB10402 DPA10301-DPB110501 DPA10301-DPB110601 DPA10301-DPB11101 DPA10301-DPB11301 DPA10301-DPB11801 DPA10301-DPB12301 DPA10301-DPB13901 DPA10301-DPB14001 DPA10301-DPB14901 DPA10301-DPB15501 DPA10301-DPB16501 DPA10301-DPB17501 DPA10301-DPB18001 DPA10401-DPB10101 DPA10401-DPB10201 DPA10401-DPB10202 DPA10401-DPB10402 DPA10401-DPB10501 DPA10401-DPB110501 DPA10401-DPB14901
KEPPFLWEGYELIPDKWTVQ

SEQ ID NO: 6442 - protein, 14 aa, synthetic construct
  source 1..14: note = Seed: PPFLWMGYELHPDK; note = HLAs: DPA10103-DPB10101 DPA10103-DPB10201 DPA10103-DPB10202 DPA10103-DPB10401 DPA10103-DPB112601 DPA10103-DPB11501 DPA10103-DPB11601 DPA10103-DPB11901 DPA10103-DPB12301 DPA10103-DPB13101 DPA10103-DPB13401 DPA10103-DPB13901 DPA10103-DPB14001 DPA10103-DPB14101 DPA10103-DPB14801 DPA10103-DPB15001 DPA10103-DPB15901 DPA10104-DPB10101 DPA10104-DPB11501 DPA10105-DPB10101 DPA10105-DPB10401 DPA10105-DPB15001 DPA10106-DPB10101 DPA10201-DPB10101 DPA10201-DPB110601 DPA10201-DPB11501 DPA10201-DPB11601 DPA10201-DPB11901 DPA10202-DPB10101 DPA10202-DPB10201 DPA10202-DPB10202 DPA10202-DPB10401 DPA10202-DPB110601 DPA10202-DPB11901 DPA10202-DPB13101 DPA10202-DPB16501 DPA10301-DPB10101 DPA10301-DPB10201 DPA10301-DPB10202 DPA10301-DPB10401 DPA10301-DPB10402 DPA10301-DPB110501 DPA10301-DPB110601 DPA10301-DPB11801 DPA10301-DPB12301 DPA10301-DPB13901 DPA10301-DPB14001 DPA10301-DPB14901 DPA10301-DPB15501 DPA10301-DPB16501 DPA10301-DPB17501 DPA10301-DPB18001 DPA10401-DPB10101 DPA10401-DPB10201; note = HLAs: DPA10401-DPB10202 DPA10401-DPB10402 DPA10401-DPB10501 DPA10401-DPB110501 DPA10401-DPB14901
PPFLWHGYELLPDK

SEQ ID NO: 6443 - protein, 14 aa, synthetic construct
  source 1..14: note = Seed: PPFLWMGYELHPDK; note = HLAs: DPA10103-DPB10101 DPA10103-DPB10201 DPA10103-DPB10202 DPA10103-DPB10401 DPA10103-DPB112601 DPA10103-DPB11501 DPA10103-DPB11601 DPA10103-DPB11901 DPA10103-DPB12301 DPA10103-DPB13101 DPA10103-DPB13401 DPA10103-DPB13901 DPA10103-DPB14001 DPA10103-DPB14101 DPA10103-DPB14801 DPA10103-DPB15001 DPA10103-DPB15901 DPA10104-DPB10101 DPA10104-DPB11501 DPA10105-DPB10101 DPA10105-DPB10401 DPA10105-DPB15001 DPA10106-DPB10101 DPA10201-DPB10101 DPA10201-DPB110601 DPA10201-DPB11501 DPA10201-DPB11601 DPA10201-DPB11901 DPA10202-DPB10101 DPA10202-DPB10201 DPA10202-DPB10202 DPA10202-DPB10401 DPA10202-DPB110601 DPA10202-DPB11901 DPA10202-DPB13101 DPA10202-DPB16501 DPA10301-DPB10101 DPA10301-DPB10201 DPA10301-DPB10202 DPA10301-DPB10401 DPA10301-DPB10402 DPA10301-DPB110501 DPA10301-DPB110601 DPA10301-DPB11801 DPA10301-DPB12301 DPA10301-DPB13901 DPA10301-DPB14001 DPA10301-DPB14901 DPA10301-DPB15501 DPA10301-DPB16501 DPA10301-DPB17501 DPA10301-DPB18001 DPA10401-DPB10101 DPA10401-DPB10201; note = HLAs: DPA10401-DPB10202 DPA10401-DPB10402 DPA10401-DPB10501 DPA10401-DPB110501 DPA10401-DPB14901
PPVLWTGFELIPDK

SEQ ID NO: 6444 - protein, 14 aa, synthetic construct
  source 1..14: note = Seed: PPFLWMGYELHPDK; note = HLAs: DPA10103-DPB10101 DPA10103-DPB10201 DPA10103-DPB10202 DPA10103-DPB10401 DPA10103-DPB112601 DPA10103-DPB11501 DPA10103-DPB11601 DPA10103-DPB11901 DPA10103-DPB12301 DPA10103-DPB13101 DPA10103-DPB13401 DPA10103-DPB13901 DPA10103-DPB14001 DPA10103-DPB14101 DPA10103-DPB14801 DPA10103-DPB15001 DPA10103-DPB15901 DPA10104-DPB10101 DPA10104-DPB11501 DPA10105-DPB10101 DPA10105-DPB10401 DPA10105-DPB15001 DPA10106-DPB10101 DPA10201-DPB10101 DPA10201-DPB110601 DPA10201-DPB11501 DPA10201-DPB11601 DPA10201-DPB11901 DPA10202-DPB10101 DPA10202-DPB10201 DPA10202-DPB10202 DPA10202-DPB10401 DPA10202-DPB110601 DPA10202-DPB11901 DPA10202-DPB13101 DPA10202-DPB16501 DPA10301-DPB10101 DPA10301-DPB10201 DPA10301-DPB10202 DPA10301-DPB10401 DPA10301-DPB10402 DPA10301-DPB110501 DPA10301-DPB110601 DPA10301-DPB11801 DPA10301-DPB12301 DPA10301-DPB13901 DPA10301-DPB14001 DPA10301-DPB14901 DPA10301-DPB15501 DPA10301-DPB16501 DPA10301-DPB17501 DPA10301-DPB18001 DPA10401-DPB10101 DPA10401-DPB10201; note = HLAs: DPA10401-DPB10202 DPA10401-DPB10402 DPA10401-DPB10501 DPA10401-DPB110501 DPA10401-DPB14901
PPLLWIGFELVPDK

SEQ ID NO: 6445 - protein, 20 aa, synthetic construct
  source 1..20: note = Seed: KEPPFLWMGYELHPDKWTVQ; note = HLAs: DPA10103-DPB10101 DPA10103-DPB10201 DPA10103-DPB10202 DPA10103-DPB10401 DPA10103-DPB10402 DPA10103-DPB10501 DPA10103-DPB110501 DPA10103-DPB112601 DPA10103-DPB11501 DPA10103-DPB11601 DPA10103-DPB11801 DPA10103-DPB11901 DPA10103-DPB12301 DPA10103-DPB13101 DPA10103-DPB13401 DPA10103-DPB13901 DPA10103-DPB14001 DPA10103-DPB14101 DPA10103-DPB14801 DPA10103-DPB14901 DPA10103-DPB15001 DPA10103-DPB15101 DPA10103-DPB15501 DPA10103-DPB15901 DPA10103-DPB18001 DPA10104-DPB10101 DPA10104-DPB11501 DPA10105-DPB10101 DPA10105-DPB10401 DPA10105-DPB11801 DPA10105-DPB15001 DPA10106-DPB10101 DPA10201-DPB10101 DPA10201-DPB10201 DPA10201-DPB10202 DPA10201-DPB10401 DPA10201-DPB10501 DPA10201-DPB110601 DPA10201-DPB11501 DPA10201-DPB11601 DPA10201-DPB11901 DPA10201-DPB13401 DPA10201-DPB15501 DPA10202-DPB10101 DPA10202-DPB10201 DPA10202-DPB10202 DPA10202-DPB10401 DPA10202-DPB10501 DPA10202-DPB110601 DPA10202-DPB11101 DPA10202-DPB11301 DPA10202-DPB11801 DPA10202-DPB11901 DPA10202-DPB13101 DPA10202-DPB13801; note = HLAs: DPA10202-DPB15501 DPA10202-DPB16501 DPA10301-DPB10101 DPA10301-DPB10201 DPA10301-DPB10202 DPA10301-DPB10401 DPA10301-DPB10402 DPA10301-DPB110501 DPA10301-DPB110601 DPA10301-DPB11101 DPA10301-DPB11301 DPA10301-DPB11801 DPA10301-DPB12301 DPA10301-DPB13901 DPA10301-DPB14001 DPA10301-DPB14901 DPA10301-DPB15501 DPA10301-DPB16501 DPA10301-DPB17501 DPA10301-DPB18001 DPA10401-DPB10101 DPA10401-DPB10201 DPA10401-DPB10202 DPA10401-DPB10402 DPA10401-DPB10501 DPA10401-DPB110501 DPA10401-DPB14901
KEPPFLWDGFELLPDKWTVQ

SEQ ID NO: 6446 - protein, 14 aa, synthetic construct
  source 1..14: note = Seed: PPFLWMGYELHPDK; note = HLAs: DRB1_1001 DPA10103-DPB10101 DPA10103-DPB10201 DPA10103-DPB10202 DPA10103-DPB10401 DPA10103-DPB112601 DPA10103-DPB11501 DPA10103-DPB11601 DPA10103-DPB11901 DPA10103-DPB12301 DPA10103-DPB13101 DPA10103-DPB13401 DPA10103-DPB13901 DPA10103-DPB14001 DPA10103-DPB14101 DPA10103-DPB14801 DPA10103-DPB15001 DPA10103-DPB15901 DPA10104-DPB10101 DPA10104-DPB11501 DPA10105-DPB10101 DPA10105-DPB10401 DPA10105-DPB15001 DPA10106-DPB10101 DPA10201-DPB10101 DPA10201-DPB110601 DPA10201-DPB11501 DPA10201-DPB11601 DPA10201-DPB11901 DPA10202-DPB10101 DPA10202-DPB10201 DPA10202-DPB10202 DPA10202-DPB10401 DPA10202-DPB110601 DPA10202-DPB11901 DPA10202-DPB13101 DPA10202-DPB16501 DPA10301-DPB10101 DPA10301-DPB10201 DPA10301-DPB10202 DPA10301-DPB10401 DPA10301-DPB10402 DPA10301-DPB110501 DPA10301-DPB110601 DPA10301-DPB11801 DPA10301-DPB12301 DPA10301-DPB13901 DPA10301-DPB14001 DPA10301-DPB14901 DPA10301-DPB15501 DPA10301-DPB16501 DPA10301-DPB17501 DPA10301-DPB18001 DPA10401-DPB10101 DPA10401-DPB10201; note = HLAs: DPA10401-DPB10202 DPA10401-DPB10402 DPA10401-DPB10501 DPA10401-DPB110501 DPA10401-DPB14901
PPFLWQGFELAPDK

SEQ ID NO: 6447 - protein, 20 aa, synthetic construct
  source 1..20: note = Seed: KEPPFLWMGYELHPDKWTVQ; note = HLAs: DRB1_0101 DPA10103-DPB10101 DPA10103-DPB10201 DPA10103-DPB10202 DPA10103-DPB10401 DPA10103-DPB10402 DPA10103-DPB10501 DPA10103-DPB110501 DPA10103-DPB112601 DPA10103-DPB11501 DPA10103-DPB11601 DPA10103-DPB11801 DPA10103-DPB11901 DPA10103-DPB12301 DPA10103-DPB13101 DPA10103-DPB13401 DPA10103-DPB13901 DPA10103-DPB14001 DPA10103-DPB14101 DPA10103-DPB14801 DPA10103-DPB14901 DPA10103-DPB15001 DPA10103-DPB15101 DPA10103-DPB15501 DPA10103-DPB15901 DPA10103-DPB18001 DPA10104-DPB10101 DPA10104-DPB11501 DPA10105-DPB10101 DPA10105-DPB10401 DPA10105-DPB11801 DPA10105-DPB15001 DPA10106-DPB10101 DPA10201-DPB10101 DPA10201-DPB10201 DPA10201-DPB10202 DPA10201-DPB10401 DPA10201-DPB10501 DPA10201-DPB110601 DPA10201-DPB11501 DPA10201-DPB11601 DPA10201-DPB11901 DPA10201-DPB13401 DPA10201-DPB15501 DPA10202-DPB10101 DPA10202-DPB10201 DPA10202-DPB10202 DPA10202-DPB10401 DPA10202-DPB10501 DPA10202-DPB110601 DPA10202-DPB11101 DPA10202-DPB11301 DPA10202-DPB11801 DPA10202-DPB11901 DPA10202-DPB13101; note = HLAs: DPA10202-DPB13801 DPA10202-DPB15501 DPA10202-DPB16501 DPA10301-DPB10101 DPA10301-DPB10201 DPA10301-DPB10202 DPA10301-DPB10401 DPA10301-DPB10402 DPA10301-DPB110501 DPA10301-DPB110601 DPA10301-DPB11101 DPA10301-DPB11301 DPA10301-DPB11801 DPA10301-DPB12301 DPA10301-DPB13901 DPA10301-DPB14001 DPA10301-DPB14901 DPA10301-DPB15501 DPA10301-DPB16501 DPA10301-DPB17501 DPA10301-DPB18001 DPA10401-DPB10101 DPA10401-DPB10201 DPA10401-DPB10202 DPA10401-DPB10402 DPA10401-DPB10501 DPA10401-DPB110501 DPA10401-DPB14901
KEPPFLWSGFELHPDKWTVQ

SEQ ID NO: 6448 - protein, 20 aa, synthetic construct
  source 1..20: note = Seed: KEPPFLWMGYELHPDKWTVQ; note = HLAs: DRB1_0101 DPA10103-DPB10101 DPA10103-DPB10201 DPA10103-DPB10202 DPA10103-DPB10401 DPA10103-DPB10402 DPA10103-DPB10501 DPA10103-DPB110501 DPA10103-DPB112601 DPA10103-DPB11501 DPA10103-DPB11601 DPA10103-DPB11801 DPA10103-DPB11901 DPA10103-DPB12301 DPA10103-DPB13101 DPA10103-DPB13401 DPA10103-DPB13901 DPA10103-DPB14001 DPA10103-DPB14101 DPA10103-DPB14801 DPA10103-DPB14901 DPA10103-DPB15001 DPA10103-DPB15101 DPA10103-DPB15501 DPA10103-DPB15901 DPA10103-DPB18001 DPA10104-DPB10101 DPA10104-DPB11501 DPA10105-DPB10101 DPA10105-DPB10401 DPA10105-DPB11801 DPA10105-DPB15001 DPA10106-DPB10101 DPA10201-DPB10101 DPA10201-DPB10201 DPA10201-DPB10202 DPA10201-DPB10401 DPA10201-DPB10501 DPA10201-DPB110601 DPA10201-DPB11501 DPA10201-DPB11601 DPA10201-DPB11901 DPA10201-DPB13401 DPA10201-DPB15501 DPA10202-DPB10101 DPA10202-DPB10201 DPA10202-DPB10202 DPA10202-DPB10401 DPA10202-DPB10501 DPA10202-DPB110601 DPA10202-DPB11101 DPA10202-DPB11301 DPA10202-DPB11801 DPA10202-DPB11901 DPA10202-DPB13101; note = HLAs: DPA10202-DPB13801 DPA10202-DPB15501 DPA10202-DPB16501 DPA10301-DPB10101 DPA10301-DPB10201 DPA10301-DPB10202 DPA10301-DPB10401 DPA10301-DPB10402 DPA10301-DPB110501 DPA10301-DPB110601 DPA10301-DPB11101 DPA10301-DPB11301 DPA10301-DPB11801 DPA10301-DPB12301 DPA10301-DPB13901 DPA10301-DPB14001 DPA10301-DPB14901 DPA10301-DPB15501 DPA10301-DPB16501 DPA10301-DPB17501 DPA10301-DPB18001 DPA10401-DPB10101 DPA10401-DPB10201 DPA10401-DPB10202 DPA10401-DPB10402 DPA10401-DPB10501 DPA10401-DPB110501 DPA10401-DPB14901
KEPPFLWIGFELYPDKWTVQ

SEQ ID NO: 6449 - protein, 14 aa, synthetic construct
  source 1..14: note = Seed: PPFLWMGYELHPDK; note = HLAs: DPA10103-DPB10101 DPA10103-DPB10201 DPA10103-DPB10202 DPA10103-DPB10401 DPA10103-DPB112601 DPA10103-DPB11501 DPA10103-DPB11601 DPA10103-DPB11901 DPA10103-DPB12301 DPA10103-DPB13101 DPA10103-DPB13401 DPA10103-DPB13901 DPA10103-DPB14001 DPA10103-DPB14101 DPA10103-DPB14801 DPA10103-DPB15001 DPA10103-DPB15901 DPA10104-DPB10101 DPA10104-DPB11501 DPA10105-DPB10101 DPA10105-DPB10401 DPA10105-DPB15001 DPA10106-DPB10101 DPA10201-DPB10101 DPA10201-DPB110601 DPA10201-DPB11501 DPA10201-DPB11601 DPA10201-DPB11901 DPA10202-DPB10101 DPA10202-DPB10201 DPA10202-DPB10202 DPA10202-DPB10401 DPA10202-DPB110601 DPA10202-DPB11901 DPA10202-DPB13101 DPA10202-DPB16501 DPA10301-DPB10101 DPA10301-DPB10201 DPA10301-DPB10202 DPA10301-DPB10401 DPA10301-DPB10402 DPA10301-DPB110501 DPA10301-DPB110601 DPA10301-DPB11801 DPA10301-DPB12301 DPA10301-DPB13901 DPA10301-DPB14001 DPA10301-DPB14901 DPA10301-DPB15501 DPA10301-DPB16501 DPA10301-DPB17501 DPA10301-DPB18001 DPA10401-DPB10101 DPA10401-DPB10201; note = HLAs: DPA10401-DPB10202 DPA10401-DPB10402 DPA10401-DPB10501 DPA10401-DPB110501 DPA10401-DPB14901
PPILWTGFELAPDK

SEQ ID NO: 6450 - protein, 20 aa, synthetic construct
  source 1..20: note = Seed: KEPPFLWMGYELHPDKWTVQ; note = HLAs: DRB1_0101 DRB1_1001 DPA10103-DPB10101 DPA10103-DPB10201 DPA10103-DPB10202 DPA10103-DPB10401 DPA10103-DPB10402 DPA10103-DPB10501 DPA10103-DPB110501 DPA10103-DPB112601 DPA10103-DPB11501 DPA10103-DPB11601 DPA10103-DPB11801 DPA10103-DPB11901 DPA10103-DPB12301 DPA10103-DPB13101 DPA10103-DPB13401 DPA10103-DPB13901 DPA10103-DPB14001 DPA10103-DPB14101 DPA10103-DPB14801 DPA10103-DPB14901 DPA10103-DPB15001 DPA10103-DPB15101 DPA10103-DPB15501 DPA10103-DPB15901 DPA10103-DPB18001 DPA10104-DPB10101 DPA10104-DPB11501 DPA10105-DPB10101 DPA10105-DPB10401 DPA10105-DPB11801 DPA10105-DPB15001 DPA10106-DPB10101 DPA10201-DPB10101 DPA10201-DPB10201 DPA10201-DPB10202 DPA10201-DPB10401 DPA10201-DPB10501 DPA10201-DPB110601 DPA10201-DPB11501 DPA10201-DPB11601 DPA10201-DPB11901 DPA10201-DPB13401 DPA10201-DPB15501 DPA10202-DPB10101 DPA10202-DPB10201 DPA10202-DPB10202 DPA10202-DPB10401 DPA10202-DPB10501 DPA10202-DPB110601 DPA10202-DPB11101 DPA10202-DPB11301 DPA10202-DPB11801 DPA10202-DPB11901; note = HLAs: DPA10202-DPB13101 DPA10202-DPB13801 DPA10202-DPB15501 DPA10202-DPB16501 DPA10301-DPB10101 DPA10301-DPB10201 DPA10301-DPB10202 DPA10301-DPB10401 DPA10301-DPB10402 DPA10301-DPB110501 DPA10301-DPB110601 DPA10301-DPB11101 DPA10301-DPB11301 DPA10301-DPB11801 DPA10301-DPB12301 DPA10301-DPB13901 DPA10301-DPB14001 DPA10301-DPB14901 DPA10301-DPB15501 DPA10301-DPB16501 DPA10301-DPB17501 DPA10301-DPB18001 DPA10401-DPB10101 DPA10401-DPB10201 DPA10401-DPB10202 DPA10401-DPB10402 DPA10401-DPB10501 DPA10401-DPB110501 DPA10401-DPB14901
KEPPFLWTGLELLPDKWTVQ

SEQ ID NO: 6451 - protein, 14 aa, synthetic construct
  source 1..14: note = Seed: PPFLWMGYELHPDK; note = HLAs: DPA10103-DPB10101 DPA10103-DPB10201 DPA10103-DPB10202 DPA10103-DPB10401 DPA10103-DPB112601 DPA10103-DPB11501 DPA10103-DPB11601 DPA10103-DPB11901 DPA10103-DPB12301 DPA10103-DPB13101 DPA10103-DPB13401 DPA10103-DPB13901 DPA10103-DPB14001 DPA10103-DPB14101 DPA10103-DPB14801 DPA10103-DPB15001 DPA10103-DPB15901 DPA10104-DPB10101 DPA10104-DPB11501 DPA10105-DPB10101 DPA10105-DPB10401 DPA10105-DPB15001 DPA10106-DPB10101 DPA10201-DPB10101 DPA10201-DPB110601 DPA10201-DPB11501 DPA10201-DPB11601 DPA10201-DPB11901 DPA10202-DPB10101 DPA10202-DPB10201 DPA10202-DPB10202 DPA10202-DPB10401 DPA10202-DPB110601 DPA10202-DPB11901 DPA10202-DPB13101 DPA10202-DPB16501 DPA10301-DPB10101 DPA10301-DPB10201 DPA10301-DPB10202 DPA10301-DPB10401 DPA10301-DPB10402 DPA10301-DPB110501 DPA10301-DPB110601 DPA10301-DPB11801 DPA10301-DPB12301 DPA10301-DPB13901 DPA10301-DPB14001 DPA10301-DPB14901 DPA10301-DPB15501 DPA10301-DPB16501 DPA10301-DPB17501 DPA10301-DPB18001 DPA10401-DPB10101 DPA10401-DPB10201; note = HLAs: DPA10401-DPB10202 DPA10401-DPB10402 DPA10401-DPB10501 DPA10401-DPB110501 DPA10401-DPB14901
PPFLWKGFELMPDK

SEQ ID NO: 6452 - protein, 20 aa, synthetic construct
  source 1..20: note = Seed: KEPPFLWMGYELHPDKWTVQ; note = HLAs: DRB1_0101 DRB1_1001 DPA10103-DPB10101 DPA10103-DPB10201 DPA10103-DPB10202 DPA10103-DPB10401 DPA10103-DPB10402 DPA10103-DPB10501 DPA10103-DPB110501 DPA10103-DPB112601 DPA10103-DPB11501 DPA10103-DPB11601 DPA10103-DPB11801 DPA10103-DPB11901 DPA10103-DPB12301 DPA10103-DPB13101 DPA10103-DPB13401 DPA10103-DPB13901 DPA10103-DPB14001 DPA10103-DPB14101 DPA10103-DPB14801 DPA10103-DPB14901 DPA10103-DPB15001 DPA10103-DPB15101 DPA10103-DPB15501 DPA10103-DPB15901 DPA10103-DPB18001 DPA10104-DPB10101 DPA10104-DPB11501 DPA10105-DPB10101 DPA10105-DPB10401 DPA10105-DPB11801 DPA10105-DPB15001 DPA10106-DPB10101 DPA10201-DPB10101 DPA10201-DPB10201 DPA10201-DPB10202 DPA10201-DPB10401 DPA10201-DPB10501 DPA10201-DPB110601 DPA10201-DPB11501 DPA10201-DPB11601 DPA10201-DPB11901 DPA10201-DPB13401 DPA10201-DPB15501 DPA10202-DPB10101 DPA10202-DPB10201 DPA10202-DPB10202 DPA10202-DPB10401 DPA10202-DPB10501 DPA10202-DPB110601 DPA10202-DPB11101 DPA10202-DPB11301 DPA10202-DPB11801 DPA10202-DPB11901; note = HLAs: DPA10202-DPB13101 DPA10202-DPB13801 DPA10202-DPB15501 DPA10202-DPB16501 DPA10301-DPB10101 DPA10301-DPB10201 DPA10301-DPB10202 DPA10301-DPB10401 DPA10301-DPB10402 DPA10301-DPB110501 DPA10301-DPB110601 DPA10301-DPB11101 DPA10301-DPB11301 DPA10301-DPB11801 DPA10301-DPB12301 DPA10301-DPB13901 DPA10301-DPB14001 DPA10301-DPB14901 DPA10301-DPB15501 DPA10301-DPB16501 DPA10301-DPB17501 DPA10301-DPB18001 DPA10401-DPB10101 DPA10401-DPB10201 DPA10401-DPB10202 DPA10401-DPB10402 DPA10401-DPB10501 DPA10401-DPB110501 DPA10401-DPB14901
KEPPFLWIGFELTPDKWTVQ

SEQ ID NO: 6453 - protein, 14 aa, synthetic construct
  source 1..14: note = Seed: PPFLWMGYELHPDK; note = HLAs: DPA10103-DPB10101 DPA10103-DPB10201 DPA10103-DPB10202 DPA10103-DPB10401 DPA10103-DPB112601 DPA10103-DPB11501 DPA10103-DPB11601 DPA10103-DPB11901 DPA10103-DPB12301 DPA10103-DPB13101 DPA10103-DPB13401 DPA10103-DPB13901 DPA10103-DPB14001 DPA10103-DPB14101 DPA10103-DPB14801 DPA10103-DPB15001 DPA10103-DPB15901 DPA10104-DPB10101 DPA10104-DPB11501 DPA10105-DPB10101 DPA10105-DPB10401 DPA10105-DPB15001 DPA10106-DPB10101 DPA10201-DPB10101 DPA10201-DPB110601 DPA10201-DPB11501 DPA10201-DPB11601 DPA10201-DPB11901 DPA10202-DPB10101 DPA10202-DPB10201 DPA10202-DPB10202 DPA10202-DPB10401 DPA10202-DPB110601 DPA10202-DPB11901 DPA10202-DPB13101 DPA10202-DPB16501 DPA10301-DPB10101 DPA10301-DPB10201 DPA10301-DPB10202 DPA10301-DPB10401 DPA10301-DPB10402 DPA10301-DPB110501 DPA10301-DPB110601 DPA10301-DPB11801 DPA10301-DPB12301 DPA10301-DPB13901 DPA10301-DPB14001 DPA10301-DPB14901 DPA10301-DPB15501 DPA10301-DPB16501 DPA10301-DPB17501 DPA10301-DPB18001 DPA10401-DPB10101 DPA10401-DPB10201; note = HLAs: DPA10401-DPB10202 DPA10401-DPB10402 DPA10401-DPB10501 DPA10401-DPB110501 DPA10401-DPB14901
PPLLWSGFELAPDK

SEQ ID NO: 6454 - protein, 20 aa, synthetic construct
  source 1..20: note = Seed: KEPPFLWMGYELHPDKWTVQ; note = HLAs: DRB1_0101 DRB1_1001 DPA10103-DPB10101 DPA10103-DPB10201 DPA10103-DPB10202 DPA10103-DPB10401 DPA10103-DPB10402 DPA10103-DPB10501 DPA10103-DPB110501 DPA10103-DPB112601 DPA10103-DPB11501 DPA10103-DPB11601 DPA10103-DPB11801 DPA10103-DPB11901 DPA10103-DPB12301 DPA10103-DPB13101 DPA10103-DPB13401 DPA10103-DPB13901 DPA10103-DPB14001 DPA10103-DPB14101 DPA10103-DPB14801 DPA10103-DPB14901 DPA10103-DPB15001 DPA10103-DPB15101 DPA10103-DPB15501 DPA10103-DPB15901 DPA10103-DPB18001 DPA10104-DPB10101 DPA10104-DPB11501 DPA10105-DPB10101 DPA10105-DPB10401 DPA10105-DPB11801 DPA10105-DPB15001 DPA10106-DPB10101 DPA10201-DPB10101 DPA10201-DPB10201 DPA10201-DPB10202 DPA10201-DPB10401 DPA10201-DPB10501 DPA10201-DPB110601 DPA10201-DPB11501 DPA10201-DPB11601 DPA10201-DPB11901 DPA10201-DPB13401 DPA10201-DPB15501 DPA10202-DPB10101 DPA10202-DPB10201 DPA10202-DPB10202 DPA10202-DPB10401 DPA10202-DPB10501 DPA10202-DPB110601 DPA10202-DPB11101 DPA10202-DPB11301 DPA10202-DPB11801 DPA10202-DPB11901; note = HLAs: DPA10202-DPB13101 DPA10202-DPB13801 DPA10202-DPB15501 DPA10202-DPB16501 DPA10301-DPB10101 DPA10301-DPB10201 DPA10301-DPB10202 DPA10301-DPB10401 DPA10301-DPB10402 DPA10301-DPB110501 DPA10301-DPB110601 DPA10301-DPB11101 DPA10301-DPB11301 DPA10301-DPB11801 DPA10301-DPB12301 DPA10301-DPB13901 DPA10301-DPB14001 DPA10301-DPB14901 DPA10301-DPB15501 DPA10301-DPB16501 DPA10301-DPB17501 DPA10301-DPB18001 DPA10401-DPB10101 DPA10401-DPB10201 DPA10401-DPB10202 DPA10401-DPB10402 DPA10401-DPB10501 DPA10401-DPB110501 DPA10401-DPB14901
KEPPFLWQGFELAPDKWTVQ

SEQ ID NO: 6455 - protein, 14 aa, synthetic construct
  source 1..14: note = Seed: PPFLWMGYELHPDK; note = HLAs: DPA10103-DPB10101 DPA10103-DPB10201 DPA10103-DPB10202 DPA10103-DPB10401 DPA10103-DPB112601 DPA10103-DPB11501 DPA10103-DPB11601 DPA10103-DPB11901 DPA10103-DPB12301 DPA10103-DPB13101 DPA10103-DPB13401 DPA10103-DPB13901 DPA10103-DPB14001 DPA10103-DPB14101 DPA10103-DPB14801 DPA10103-DPB15001 DPA10103-DPB15901 DPA10104-DPB10101 DPA10104-DPB11501 DPA10105-DPB10101 DPA10105-DPB10401 DPA10105-DPB15001 DPA10106-DPB10101 DPA10201-DPB10101 DPA10201-DPB110601 DPA10201-DPB11501 DPA10201-DPB11601 DPA10201-DPB11901 DPA10202-DPB10101 DPA10202-DPB10201 DPA10202-DPB10202 DPA10202-DPB10401 DPA10202-DPB110601 DPA10202-DPB11901 DPA10202-DPB13101 DPA10202-DPB16501 DPA10301-DPB10101 DPA10301-DPB10201 DPA10301-DPB10202 DPA10301-DPB10401 DPA10301-DPB10402 DPA10301-DPB110501 DPA10301-DPB110601 DPA10301-DPB11801 DPA10301-DPB12301 DPA10301-DPB13901 DPA10301-DPB14001 DPA10301-DPB14901 DPA10301-DPB16501 DPA10301-DPB17501 DPA10301-DPB18001 DPA10401-DPB10101 DPA10401-DPB10201 DPA10401-DPB10202; note = HLAs: DPA10401-DPB10402 DPA10401-DPB10501 DPA10401-DPB110501 DPA10401-DPB14901
PPFLWYGFELLPDK

SEQ ID NO: 6456 - protein, 14 aa, synthetic construct
  source 1..14: note = Seed: PPFLWMGYELHPDK; note = HLAs: DRB1_1001 DPA10103-DPB10101 DPA10103-DPB10201 DPA10103-DPB10202 DPA10103-DPB10401 DPA10103-DPB112601 DPA10103-DPB11501 DPA10103-DPB11601 DPA10103-DPB11901 DPA10103-DPB12301 DPA10103-DPB13101 DPA10103-DPB13401 DPA10103-DPB13901 DPA10103-DPB14001 DPA10103-DPB14101 DPA10103-DPB14801 DPA10103-DPB15001 DPA10103-DPB15901 DPA10104-DPB10101 DPA10104-DPB11501 DPA10105-DPB10101 DPA10105-DPB10401 DPA10105-DPB15001 DPA10106-DPB10101 DPA10201-DPB10101 DPA10201-DPB110601 DPA10201-DPB11501 DPA10201-DPB11601 DPA10201-DPB11901 DPA10202-DPB10101 DPA10202-DPB10201 DPA10202-DPB10202 DPA10202-DPB10401 DPA10202-DPB110601 DPA10202-DPB11901 DPA10202-DPB13101 DPA10202-DPB16501 DPA10301-DPB10101 DPA10301-DPB10201 DPA10301-DPB10202 DPA10301-DPB10401 DPA10301-DPB10402 DPA10301-DPB110501 DPA10301-DPB110601 DPA10301-DPB11801 DPA10301-DPB12301 DPA10301-DPB13901 DPA10301-DPB14001 DPA10301-DPB14901 DPA10301-DPB15501 DPA10301-DPB16501 DPA10301-DPB17501 DPA10301-DPB18001 DPA10401-DPB10101 DPA10401-DPB10201; note = HLAs: DPA10401-DPB10202 DPA10401-DPB10402 DPA10401-DPB10501 DPA10401-DPB110501 DPA10401-DPB14901
PPFLWAGWELVPDK

SEQ ID NO: 6457 - protein, 14 aa, synthetic construct
  source 1..14: note = Seed: PPFLWMGYELHPDK; note = HLAs: DPA10103-DPB10101 DPA10103-DPB10201 DPA10103-DPB10202 DPA10103-DPB10401 DPA10103-DPB112601 DPA10103-DPB11501 DPA10103-DPB11601 DPA10103-DPB11901 DPA10103-DPB12301 DPA10103-DPB13101 DPA10103-DPB13401 DPA10103-DPB13901 DPA10103-DPB14001 DPA10103-DPB14101 DPA10103-DPB14801 DPA10103-DPB15001 DPA10103-DPB15901 DPA10104-DPB10101 DPA10104-DPB11501 DPA10105-DPB10101 DPA10105-DPB10401 DPA10105-DPB15001 DPA10106-DPB10101 DPA10201-DPB10101 DPA10201-DPB110601 DPA10201-DPB11501 DPA10201-DPB11601 DPA10201-DPB11901 DPA10202-DPB10101 DPA10202-DPB10201 DPA10202-DPB10202 DPA10202-DPB10401 DPA10202-DPB110601 DPA10202-DPB11901 DPA10202-DPB13101 DPA10202-DPB16501 DPA10301-DPB10101 DPA10301-DPB10201 DPA10301-DPB10202 DPA10301-DPB10401 DPA10301-DPB10402 DPA10301-DPB110501 DPA10301-DPB110601 DPA10301-DPB11801 DPA10301-DPB12301 DPA10301-DPB13901 DPA10301-DPB14001 DPA10301-DPB14901 DPA10301-DPB15501 DPA10301-DPB16501 DPA10301-DPB17501 DPA10301-DPB18001 DPA10401-DPB10101 DPA10401-DPB10201; note = HLAs: DPA10401-DPB10202 DPA10401-DPB10402 DPA10401-DPB10501 DPA10401-DPB110501 DPA10401-DPB14901
PPFLWHGLELLPDK

SEQ ID NO: 6458 - protein, 14 aa, synthetic construct
  source 1..14: note = Seed: PPFLWMGYELHPDK; note = HLAs: DPA10103-DPB10101 DPA10103-DPB10201 DPA10103-DPB10202 DPA10103-DPB10401 DPA10103-DPB112601 DPA10103-DPB11501 DPA10103-DPB11601 DPA10103-DPB11901 DPA10103-DPB12301 DPA10103-DPB13101 DPA10103-DPB13401 DPA10103-DPB13901 DPA10103-DPB14001 DPA10103-DPB14101 DPA10103-DPB14801 DPA10103-DPB15001 DPA10103-DPB15901 DPA10104-DPB10101 DPA10104-DPB11501 DPA10105-DPB10101 DPA10105-DPB10401 DPA10105-DPB15001 DPA10106-DPB10101 DPA10201-DPB10101 DPA10201-DPB110601 DPA10201-DPB11501 DPA10201-DPB11601 DPA10201-DPB11901 DPA10202-DPB10101 DPA10202-DPB10201 DPA10202-DPB10202 DPA10202-DPB10401 DPA10202-DPB110601 DPA10202-DPB11901 DPA10202-DPB13101 DPA10202-DPB16501 DPA10301-DPB10101 DPA10301-DPB10201 DPA10301-DPB10202 DPA10301-DPB10401 DPA10301-DPB10402 DPA10301-DPB110501 DPA10301-DPB110601 DPA10301-DPB11801 DPA10301-DPB12301 DPA10301-DPB13901 DPA10301-DPB14001 DPA10301-DPB14901 DPA10301-DPB16501 DPA10301-DPB17501 DPA10301-DPB18001 DPA10401-DPB10101 DPA10401-DPB10201 DPA10401-DPB10202; note = HLAs: DPA10401-DPB10402 DPA10401-DPB10501 DPA10401-DPB110501 DPA10401-DPB14901
PPMLWAGFELLPDK

SEQ ID NO: 6459 - protein, 20 aa, synthetic construct
  source 1..20: note = Seed: KEPPFLWMGYELHPDKWTVQ; note = HLAs: DRB1_0101 DPA10103-DPB10101 DPA10103-DPB10201 DPA10103-DPB10202 DPA10103-DPB10401 DPA10103-DPB10402 DPA10103-DPB10501 DPA10103-DPB110501 DPA10103-DPB112601 DPA10103-DPB11501 DPA10103-DPB11601 DPA10103-DPB11801 DPA10103-DPB11901 DPA10103-DPB12301 DPA10103-DPB13101 DPA10103-DPB13401 DPA10103-DPB13901 DPA10103-DPB14001 DPA10103-DPB14101 DPA10103-DPB14801 DPA10103-DPB14901 DPA10103-DPB15001 DPA10103-DPB15101 DPA10103-DPB15501 DPA10103-DPB15901 DPA10103-DPB18001 DPA10104-DPB10101 DPA10104-DPB11501 DPA10105-DPB10101 DPA10105-DPB10401 DPA10105-DPB11801 DPA10105-DPB15001 DPA10106-DPB10101 DPA10201-DPB10101 DPA10201-DPB10201 DPA10201-DPB10202 DPA10201-DPB10401 DPA10201-DPB10501 DPA10201-DPB110601 DPA10201-DPB11501 DPA10201-DPB11601 DPA10201-DPB11901 DPA10201-DPB13401 DPA10201-DPB15501 DPA10202-DPB10101 DPA10202-DPB10201 DPA10202-DPB10202 DPA10202-DPB10401 DPA10202-DPB10501 DPA10202-DPB110601 DPA10202-DPB11101 DPA10202-DPB11301 DPA10202-DPB11801 DPA10202-DPB11901 DPA10202-DPB13101; note = HLAs: DPA10202-DPB13801 DPA10202-DPB15501 DPA10202-DPB16501 DPA10301-DPB10101 DPA10301-DPB10201 DPA10301-DPB10202 DPA10301-DPB10401 DPA10301-DPB10402 DPA10301-DPB110501 DPA10301-DPB110601 DPA10301-DPB11101 DPA10301-DPB11301 DPA10301-DPB11801 DPA10301-DPB12301 DPA10301-DPB13901 DPA10301-DPB14001 DPA10301-DPB14901 DPA10301-DPB15501 DPA10301-DPB16501 DPA10301-DPB17501 DPA10301-DPB18001 DPA10401-DPB10101 DPA10401-DPB10201 DPA10401-DPB10202 DPA10401-DPB10402 DPA10401-DPB10501 DPA10401-DPB110501 DPA10401-DPB14901
KEPPYLWQGFELIPDKWTVQ

SEQ ID NO: 6460 - protein, 14 aa, synthetic construct
  source 1..14: note = Seed: PPFLWMGYELHPDK; note = HLAs: DPA10103-DPB10101 DPA10103-DPB10201 DPA10103-DPB10202 DPA10103-DPB10401 DPA10103-DPB112601 DPA10103-DPB11501 DPA10103-DPB11601 DPA10103-DPB11901 DPA10103-DPB12301 DPA10103-DPB13101 DPA10103-DPB13401 DPA10103-DPB13901 DPA10103-DPB14001 DPA10103-DPB14101 DPA10103-DPB14801 DPA10103-DPB15001 DPA10103-DPB15901 DPA10104-DPB10101 DPA10104-DPB11501 DPA10105-DPB10101 DPA10105-DPB10401 DPA10105-DPB15001 DPA10106-DPB10101 DPA10201-DPB10101 DPA10201-DPB110601 DPA10201-DPB11501 DPA10201-DPB11601 DPA10201-DPB11901 DPA10202-DPB10101 DPA10202-DPB10201 DPA10202-DPB10202 DPA10202-DPB10401 DPA10202-DPB110601 DPA10202-DPB11901 DPA10202-DPB13101 DPA10202-DPB16501 DPA10301-DPB10101 DPA10301-DPB10201 DPA10301-DPB10202 DPA10301-DPB10401 DPA10301-DPB10402 DPA10301-DPB110501 DPA10301-DPB110601 DPA10301-DPB11801 DPA10301-DPB12301 DPA10301-DPB13901 DPA10301-DPB14001 DPA10301-DPB14901 DPA10301-DPB15501 DPA10301-DPB16501 DPA10301-DPB17501 DPA10301-DPB18001 DPA10401-DPB10101 DPA10401-DPB10201; note = HLAs: DPA10401-DPB10202 DPA10401-DPB10402 DPA10401-DPB10501 DPA10401-DPB110501 DPA10401-DPB14901
PPFLWVGFELHPDK

SEQ ID NO: 6461 - protein, 20 aa, synthetic construct
  source 1..20: note = Seed: KEPPFLWMGYELHPDKWTVQ; note = HLAs: DPA10103-DPB10101 DPA10103-DPB10201 DPA10103-DPB10202 DPA10103-DPB10401 DPA10103-DPB10402 DPA10103-DPB10501 DPA10103-DPB110501 DPA10103-DPB112601 DPA10103-DPB11501 DPA10103-DPB11601 DPA10103-DPB11801 DPA10103-DPB11901 DPA10103-DPB12301 DPA10103-DPB13101 DPA10103-DPB13401 DPA10103-DPB13901 DPA10103-DPB14001 DPA10103-DPB14101 DPA10103-DPB14801 DPA10103-DPB14901 DPA10103-DPB15001 DPA10103-DPB15101 DPA10103-DPB15501 DPA10103-DPB15901 DPA10103-DPB18001 DPA10104-DPB10101 DPA10104-DPB11501 DPA10105-DPB10101 DPA10105-DPB10401 DPA10105-DPB11801 DPA10105-DPB15001 DPA10106-DPB10101 DPA10201-DPB10101 DPA10201-DPB10201 DPA10201-DPB10202 DPA10201-DPB10401 DPA10201-DPB10501 DPA10201-DPB110601 DPA10201-DPB11501 DPA10201-DPB11601 DPA10201-DPB11901 DPA10201-DPB13401 DPA10201-DPB15501 DPA10202-DPB10101 DPA10202-DPB10201 DPA10202-DPB10202 DPA10202-DPB10401 DPA10202-DPB10501 DPA10202-DPB110601 DPA10202-DPB11101 DPA10202-DPB11301 DPA10202-DPB11801 DPA10202-DPB11901 DPA10202-DPB13101 DPA10202-DPB13801; note = HLAs: DPA10202-DPB15501 DPA10202-DPB16501 DPA10301-DPB10101 DPA10301-DPB10201 DPA10301-DPB10202 DPA10301-DPB10401 DPA10301-DPB10402 DPA10301-DPB110501 DPA10301-DPB110601 DPA10301-DPB11101 DPA10301-DPB11301 DPA10301-DPB11801 DPA10301-DPB12301 DPA10301-DPB13901 DPA10301-DPB14001 DPA10301-DPB14901 DPA10301-DPB15501 DPA10301-DPB16501 DPA10301-DPB17501 DPA10301-DPB18001 DPA10401-DPB10101 DPA10401-DPB10201 DPA10401-DPB10202 DPA10401-DPB10402 DPA10401-DPB10501 DPA10401-DPB110501 DPA10401-DPB14901
KEPPLLWHGFELVPDKWTVQ

SEQ ID NO: 6462 - protein, 14 aa, synthetic construct
  source 1..14: note = Seed: PPFLWMGYELHPDK; note = HLAs: DRB1_1001 DPA10103-DPB10101 DPA10103-DPB10201 DPA10103-DPB10202 DPA10103-DPB10401 DPA10103-DPB112601 DPA10103-DPB11501 DPA10103-DPB11601 DPA10103-DPB11901 DPA10103-DPB12301 DPA10103-DPB13101 DPA10103-DPB13401 DPA10103-DPB13901 DPA10103-DPB14001 DPA10103-DPB14101 DPA10103-DPB14801 DPA10103-DPB15001 DPA10103-DPB15901 DPA10104-DPB10101 DPA10104-DPB11501 DPA10105-DPB10101 DPA10105-DPB10401 DPA10105-DPB15001 DPA10106-DPB10101 DPA10201-DPB10101 DPA10201-DPB110601 DPA10201-DPB11501 DPA10201-DPB11601 DPA10201-DPB11901 DPA10202-DPB10101 DPA10202-DPB10201 DPA10202-DPB10202 DPA10202-DPB10401 DPA10202-DPB110601 DPA10202-DPB11901 DPA10202-DPB13101 DPA10202-DPB16501 DPA10301-DPB10101 DPA10301-DPB10201 DPA10301-DPB10202 DPA10301-DPB10401 DPA10301-DPB10402 DPA10301-DPB110501 DPA10301-DPB110601 DPA10301-DPB11801 DPA10301-DPB12301 DPA10301-DPB13901 DPA10301-DPB14001 DPA10301-DPB14901 DPA10301-DPB15501 DPA10301-DPB16501 DPA10301-DPB17501 DPA10301-DPB18001 DPA10401-DPB10101 DPA10401-DPB10201; note = HLAs: DPA10401-DPB10202 DPA10401-DPB10402 DPA10401-DPB10501 DPA10401-DPB110501 DPA10401-DPB14901
PPYLWNGFELLPDK

SEQ ID NO: 6463 - protein, 20 aa, synthetic construct
  source 1..20: note = Seed: KEPPFLWMGYELHPDKWTVQ; note = HLAs: DPA10103-DPB10101 DPA10103-DPB10201 DPA10103-DPB10202 DPA10103-DPB10401 DPA10103-DPB10402 DPA10103-DPB10501 DPA10103-DPB110501 DPA10103-DPB112601 DPA10103-DPB11501 DPA10103-DPB11601 DPA10103-DPB11801 DPA10103-DPB11901 DPA10103-DPB12301 DPA10103-DPB13101 DPA10103-DPB13401 DPA10103-DPB13901 DPA10103-DPB14001 DPA10103-DPB14101 DPA10103-DPB14801 DPA10103-DPB14901 DPA10103-DPB15001 DPA10103-DPB15101 DPA10103-DPB15501 DPA10103-DPB15901 DPA10103-DPB18001 DPA10104-DPB10101 DPA10104-DPB11501 DPA10105-DPB10101 DPA10105-DPB10401 DPA10105-DPB11801 DPA10105-DPB15001 DPA10106-DPB10101 DPA10201-DPB10101 DPA10201-DPB10201 DPA10201-DPB10202 DPA10201-DPB10401 DPA10201-DPB10501 DPA10201-DPB110601 DPA10201-DPB11501 DPA10201-DPB11601 DPA10201-DPB11901 DPA10201-DPB13401 DPA10201-DPB15501 DPA10202-DPB10101 DPA10202-DPB10201 DPA10202-DPB10202 DPA10202-DPB10401 DPA10202-DPB10501 DPA10202-DPB110601 DPA10202-DPB11101 DPA10202-DPB11301 DPA10202-DPB11801 DPA10202-DPB11901 DPA10202-DPB13101 DPA10202-DPB13801; note = HLAs: DPA10202-DPB15501 DPA10202-DPB16501 DPA10301-DPB10101 DPA10301-DPB10201 DPA10301-DPB10202 DPA10301-DPB10401 DPA10301-DPB10402 DPA10301-DPB110501 DPA10301-DPB110601 DPA10301-DPB11101 DPA10301-DPB11301 DPA10301-DPB11801 DPA10301-DPB12301 DPA10301-DPB13901 DPA10301-DPB14001 DPA10301-DPB14901 DPA10301-DPB15501 DPA10301-DPB16501 DPA10301-DPB17501 DPA10301-DPB18001 DPA10401-DPB10101 DPA10401-DPB10201 DPA10401-DPB10202 DPA10401-DPB10402 DPA10401-DPB10501 DPA10401-DPB110501 DPA10401-DPB14901
KEPPFLWKGFELMPDKWTVQ

SEQ ID NO: 6464 - protein, 14 aa, synthetic construct
  source 1..14: note = Seed: PPFLWMGYELHPDK; note = HLAs: DPA10103-DPB10101 DPA10103-DPB10201 DPA10103-DPB10202 DPA10103-DPB10401 DPA10103-DPB112601 DPA10103-DPB11501 DPA10103-DPB11601 DPA10103-DPB11901 DPA10103-DPB12301 DPA10103-DPB13101 DPA10103-DPB13401 DPA10103-DPB13901 DPA10103-DPB14001 DPA10103-DPB14101 DPA10103-DPB14801 DPA10103-DPB15001 DPA10103-DPB15901 DPA10104-DPB10101 DPA10104-DPB11501 DPA10105-DPB10101 DPA10105-DPB10401 DPA10105-DPB15001 DPA10106-DPB10101 DPA10201-DPB10101 DPA10201-DPB110601 DPA10201-DPB11501 DPA10201-DPB11601 DPA10201-DPB11901 DPA10202-DPB10101 DPA10202-DPB10201 DPA10202-DPB10202 DPA10202-DPB10401 DPA10202-DPB110601 DPA10202-DPB11901 DPA10202-DPB13101 DPA10202-DPB16501 DPA10301-DPB10101 DPA10301-DPB10201 DPA10301-DPB10202 DPA10301-DPB10401 DPA10301-DPB10402 DPA10301-DPB110501 DPA10301-DPB110601 DPA10301-DPB11801 DPA10301-DPB12301 DPA10301-DPB13901 DPA10301-DPB14001 DPA10301-DPB14901 DPA10301-DPB15501 DPA10301-DPB16501 DPA10301-DPB17501 DPA10301-DPB18001 DPA10401-DPB10101 DPA10401-DPB10201; note = HLAs: DPA10401-DPB10202 DPA10401-DPB10402 DPA10401-DPB10501 DPA10401-DPB110501 DPA10401-DPB14901
PPWLWHGFELIPDK

SEQ ID NO: 6465 - protein, 20 aa, synthetic construct
  source 1..20: note = Seed: KEPPFLWMGYELHPDKWTVQ; note = HLAs: DPA10103-DPB10101 DPA10103-DPB10201 DPA10103-DPB10202 DPA10103-DPB10401 DPA10103-DPB10402 DPA10103-DPB10501 DPA10103-DPB110501 DPA10103-DPB112601 DPA10103-DPB11501 DPA10103-DPB11601 DPA10103-DPB11801 DPA10103-DPB11901 DPA10103-DPB12301 DPA10103-DPB13101 DPA10103-DPB13401 DPA10103-DPB13901 DPA10103-DPB14001 DPA10103-DPB14101 DPA10103-DPB14801 DPA10103-DPB14901 DPA10103-DPB15001 DPA10103-DPB15101 DPA10103-DPB15501 DPA10103-DPB15901 DPA10103-DPB18001 DPA10104-DPB10101 DPA10104-DPB11501 DPA10105-DPB10101 DPA10105-DPB10401 DPA10105-DPB11801 DPA10105-DPB15001 DPA10106-DPB10101 DPA10201-DPB10101 DPA10201-DPB10201 DPA10201-DPB10202 DPA10201-DPB10401 DPA10201-DPB10501 DPA10201-DPB110601 DPA10201-DPB11501 DPA10201-DPB11601 DPA10201-DPB11901 DPA10201-DPB13401 DPA10201-DPB15501 DPA10202-DPB10101 DPA10202-DPB10201 DPA10202-DPB10202 DPA10202-DPB10401 DPA10202-DPB10501 DPA10202-DPB110601 DPA10202-DPB11101 DPA10202-DPB11301 DPA10202-DPB11801 DPA10202-DPB11901 DPA10202-DPB13101 DPA10202-DPB13801; note = HLAs: DPA10202-DPB15501 DPA10202-DPB16501 DPA10301-DPB10101 DPA10301-DPB10201 DPA10301-DPB10202 DPA10301-DPB10401 DPA10301-DPB10402 DPA10301-DPB110501 DPA10301-DPB110601 DPA10301-DPB11101 DPA10301-DPB11301 DPA10301-DPB11801 DPA10301-DPB12301 DPA10301-DPB13901 DPA10301-DPB14001 DPA10301-DPB14901 DPA10301-DPB15501 DPA10301-DPB16501 DPA10301-DPB17501 DPA10301-DPB18001 DPA10401-DPB10101 DPA10401-DPB10201 DPA10401-DPB10202 DPA10401-DPB10402 DPA10401-DPB10501 DPA10401-DPB110501 DPA10401-DPB14901
KEPPFLWHGYELLPDKWTVQ

SEQ ID NO: 6466 - protein, 14 aa, synthetic construct
  source 1..14: note = Seed: PPFLWMGYELHPDK; note = HLAs: DPA10103-DPB10101 DPA10103-DPB10201 DPA10103-DPB10202 DPA10103-DPB10401 DPA10103-DPB112601 DPA10103-DPB11501 DPA10103-DPB11601 DPA10103-DPB11901 DPA10103-DPB12301 DPA10103-DPB13101 DPA10103-DPB13401 DPA10103-DPB13901 DPA10103-DPB14001 DPA10103-DPB14101 DPA10103-DPB14801 DPA10103-DPB15001 DPA10103-DPB15901 DPA10104-DPB10101 DPA10104-DPB11501 DPA10105-DPB10101 DPA10105-DPB10401 DPA10105-DPB15001 DPA10106-DPB10101 DPA10201-DPB10101 DPA10201-DPB110601 DPA10201-DPB11501 DPA10201-DPB11601 DPA10201-DPB11901 DPA10202-DPB10101 DPA10202-DPB10201 DPA10202-DPB10202 DPA10202-DPB10401 DPA10202-DPB110601 DPA10202-DPB11901 DPA10202-DPB13101 DPA10202-DPB16501 DPA10301-DPB10101 DPA10301-DPB10201 DPA10301-DPB10202 DPA10301-DPB10401 DPA10301-DPB10402 DPA10301-DPB110501 DPA10301-DPB110601 DPA10301-DPB11801 DPA10301-DPB12301 DPA10301-DPB13901 DPA10301-DPB14001 DPA10301-DPB14901 DPA10301-DPB15501 DPA10301-DPB16501 DPA10301-DPB17501 DPA10301-DPB18001 DPA10401-DPB10101 DPA10401-DPB10201; note = HLAs: DPA10401-DPB10202 DPA10401-DPB10402 DPA10401-DPB10501 DPA10401-DPB110501 DPA10401-DPB14901
PPLLWHGFELIPDK

SEQ ID NO: 6467 - protein, 14 aa, synthetic construct
  source 1..14: note = Seed: PPFLWMGYELHPDK; note = HLAs: DPA10103-DPB10101 DPA10103-DPB10201 DPA10103-DPB10202 DPA10103-DPB10401 DPA10103-DPB112601 DPA10103-DPB11501 DPA10103-DPB11601 DPA10103-DPB11901 DPA10103-DPB12301 DPA10103-DPB13101 DPA10103-DPB13401 DPA10103-DPB13901 DPA10103-DPB14001 DPA10103-DPB14101 DPA10103-DPB14801 DPA10103-DPB15001 DPA10103-DPB15901 DPA10104-DPB10101 DPA10104-DPB11501 DPA10105-DPB10101 DPA10105-DPB10401 DPA10105-DPB15001 DPA10106-DPB10101 DPA10201-DPB10101 DPA10201-DPB110601 DPA10201-DPB11501 DPA10201-DPB11601 DPA10201-DPB11901 DPA10202-DPB10101 DPA10202-DPB10201 DPA10202-DPB10202 DPA10202-DPB10401 DPA10202-DPB110601 DPA10202-DPB11901 DPA10202-DPB13101 DPA10202-DPB16501 DPA10301-DPB10101 DPA10301-DPB10201 DPA10301-DPB10202 DPA10301-DPB10401 DPA10301-DPB10402 DPA10301-DPB110501 DPA10301-DPB110601 DPA10301-DPB11801 DPA10301-DPB12301 DPA10301-DPB13901 DPA10301-DPB14001 DPA10301-DPB14901 DPA10301-DPB15501 DPA10301-DPB16501 DPA10301-DPB17501 DPA10301-DPB18001 DPA10401-DPB10101 DPA10401-DPB10201; note = HLAs: DPA10401-DPB10202 DPA10401-DPB10402 DPA10401-DPB10501 DPA10401-DPB110501 DPA10401-DPB14901
PPLLWHGFELVPDK

SEQ ID NO: 6468 - protein, 14 aa, synthetic construct
  source 1..14: note = Seed: PPFLWMGYELHPDK; note = HLAs: DPA10103-DPB10101 DPA10103-DPB10201 DPA10103-DPB10202 DPA10103-DPB10401 DPA10103-DPB112601 DPA10103-DPB11501 DPA10103-DPB11601 DPA10103-DPB11901 DPA10103-DPB12301 DPA10103-DPB13101 DPA10103-DPB13401 DPA10103-DPB13901 DPA10103-DPB14001 DPA10103-DPB14101 DPA10103-DPB14801 DPA10103-DPB15001 DPA10103-DPB15901 DPA10104-DPB10101 DPA10104-DPB11501 DPA10105-DPB10101 DPA10105-DPB10401 DPA10105-DPB15001 DPA10106-DPB10101 DPA10201-DPB10101 DPA10201-DPB110601 DPA10201-DPB11501 DPA10201-DPB11601 DPA10201-DPB11901 DPA10202-DPB10101 DPA10202-DPB10201 DPA10202-DPB10202 DPA10202-DPB10401 DPA10202-DPB110601 DPA10202-DPB11901 DPA10202-DPB13101 DPA10202-DPB16501 DPA10301-DPB10101 DPA10301-DPB10201 DPA10301-DPB10202 DPA10301-DPB10401 DPA10301-DPB10402 DPA10301-DPB110501 DPA10301-DPB110601 DPA10301-DPB11801 DPA10301-DPB12301 DPA10301-DPB13901 DPA10301-DPB14001 DPA10301-DPB14901 DPA10301-DPB16501 DPA10301-DPB17501 DPA10301-DPB18001 DPA10401-DPB10101 DPA10401-DPB10201 DPA10401-DPB10202; note = HLAs: DPA10401-DPB10402 DPA10401-DPB10501 DPA10401-DPB110501 DPA10401-DPB14901
PPFLWVGWELLPDK

SEQ ID NO: 6469 - protein, 14 aa, synthetic construct
  source 1..14: note = Seed: PPFLWMGYELHPDK; note = HLAs: DPA10103-DPB10101 DPA10103-DPB10201 DPA10103-DPB10202 DPA10103-DPB10401 DPA10103-DPB112601 DPA10103-DPB11501 DPA10103-DPB11601 DPA10103-DPB11901 DPA10103-DPB12301 DPA10103-DPB13101 DPA10103-DPB13401 DPA10103-DPB13901 DPA10103-DPB14001 DPA10103-DPB14101 DPA10103-DPB14801 DPA10103-DPB15001 DPA10103-DPB15901 DPA10104-DPB10101 DPA10104-DPB11501 DPA10105-DPB10101 DPA10105-DPB10401 DPA10105-DPB15001 DPA10106-DPB10101 DPA10201-DPB10101 DPA10201-DPB110601 DPA10201-DPB11501 DPA10201-DPB11601 DPA10201-DPB11901 DPA10202-DPB10101 DPA10202-DPB10201 DPA10202-DPB10202 DPA10202-DPB10401 DPA10202-DPB110601 DPA10202-DPB11901 DPA10202-DPB13101 DPA10202-DPB16501 DPA10301-DPB10101 DPA10301-DPB10201 DPA10301-DPB10202 DPA10301-DPB10401 DPA10301-DPB10402 DPA10301-DPB110501 DPA10301-DPB110601 DPA10301-DPB11801 DPA10301-DPB12301 DPA10301-DPB13901 DPA10301-DPB14001 DPA10301-DPB14901 DPA10301-DPB16501 DPA10301-DPB17501 DPA10301-DPB18001 DPA10401-DPB10101 DPA10401-DPB10201 DPA10401-DPB10202; note = HLAs: DPA10401-DPB10402 DPA10401-DPB10501 DPA10401-DPB110501 DPA10401-DPB14901
PPILWQGFELLPDK

SEQ ID NO: 6470 - protein, 20 aa, synthetic construct
  source 1..20: note = Seed: KEPPFLWMGYELHPDKWTVQ; note = HLAs: DRB1_0101 DRB1_1001 DPA10103-DPB10101 DPA10103-DPB10201 DPA10103-DPB10202 DPA10103-DPB10401 DPA10103-DPB10402 DPA10103-DPB10501 DPA10103-DPB110501 DPA10103-DPB112601 DPA10103-DPB11501 DPA10103-DPB11601 DPA10103-DPB11801 DPA10103-DPB11901 DPA10103-DPB12301 DPA10103-DPB13101 DPA10103-DPB13401 DPA10103-DPB13901 DPA10103-DPB14001 DPA10103-DPB14101 DPA10103-DPB14801 DPA10103-DPB14901 DPA10103-DPB15001 DPA10103-DPB15101 DPA10103-DPB15501 DPA10103-DPB15901 DPA10103-DPB18001 DPA10104-DPB10101 DPA10104-DPB11501 DPA10105-DPB10101 DPA10105-DPB10401 DPA10105-DPB11801 DPA10105-DPB15001 DPA10106-DPB10101 DPA10201-DPB10101 DPA10201-DPB10201 DPA10201-DPB10202 DPA10201-DPB10401 DPA10201-DPB10501 DPA10201-DPB110601 DPA10201-DPB11501 DPA10201-DPB11601 DPA10201-DPB11901 DPA10201-DPB13401 DPA10201-DPB15501 DPA10202-DPB10101 DPA10202-DPB10201 DPA10202-DPB10202 DPA10202-DPB10401 DPA10202-DPB10501 DPA10202-DPB110601 DPA10202-DPB11101 DPA10202-DPB11301 DPA10202-DPB11801 DPA10202-DPB11901; note = HLAs: DPA10202-DPB13101 DPA10202-DPB13801 DPA10202-DPB15501 DPA10202-DPB16501 DPA10301-DPB10101 DPA10301-DPB10201 DPA10301-DPB10202 DPA10301-DPB10401 DPA10301-DPB10402 DPA10301-DPB110501 DPA10301-DPB110601 DPA10301-DPB11101 DPA10301-DPB11301 DPA10301-DPB11801 DPA10301-DPB12301 DPA10301-DPB13901 DPA10301-DPB14001 DPA10301-DPB14901 DPA10301-DPB15501 DPA10301-DPB16501 DPA10301-DPB17501 DPA10301-DPB18001 DPA10401-DPB10101 DPA10401-DPB10201 DPA10401-DPB10202 DPA10401-DPB10402 DPA10401-DPB10501 DPA10401-DPB110501 DPA10401-DPB14901
KEPPFLWAGWELVPDKWTVQ

SEQ ID NO: 6471 - protein, 20 aa, synthetic construct
  source 1..20: note = Seed: KEPPFLWMGYELHPDKWTVQ; note = HLAs: DRB1_0101 DPA10103-DPB10101 DPA10103-DPB10201 DPA10103-DPB10202 DPA10103-DPB10401 DPA10103-DPB10402 DPA10103-DPB10501 DPA10103-DPB110501 DPA10103-DPB112601 DPA10103-DPB11501 DPA10103-DPB11601 DPA10103-DPB11801 DPA10103-DPB11901 DPA10103-DPB12301 DPA10103-DPB13101 DPA10103-DPB13401 DPA10103-DPB13901 DPA10103-DPB14001 DPA10103-DPB14101 DPA10103-DPB14801 DPA10103-DPB14901 DPA10103-DPB15001 DPA10103-DPB15101 DPA10103-DPB15501 DPA10103-DPB15901 DPA10103-DPB18001 DPA10104-DPB10101 DPA10104-DPB11501 DPA10105-DPB10101 DPA10105-DPB10401 DPA10105-DPB11801 DPA10105-DPB15001 DPA10106-DPB10101 DPA10201-DPB10101 DPA10201-DPB10201 DPA10201-DPB10202 DPA10201-DPB10401 DPA10201-DPB10501 DPA10201-DPB110601 DPA10201-DPB11501 DPA10201-DPB11601 DPA10201-DPB11901 DPA10201-DPB13401 DPA10201-DPB15501 DPA10202-DPB10101 DPA10202-DPB10201 DPA10202-DPB10202 DPA10202-DPB10401 DPA10202-DPB10501 DPA10202-DPB110601 DPA10202-DPB11101 DPA10202-DPB11301 DPA10202-DPB11801 DPA10202-DPB11901 DPA10202-DPB13101; note = HLAs: DPA10202-DPB13801 DPA10202-DPB15501 DPA10202-DPB16501 DPA10301-DPB10101 DPA10301-DPB10201 DPA10301-DPB10202 DPA10301-DPB10401 DPA10301-DPB10402 DPA10301-DPB110501 DPA10301-DPB110601 DPA10301-DPB11101 DPA10301-DPB11301 DPA10301-DPB11801 DPA10301-DPB12301 DPA10301-DPB13901 DPA10301-DPB14001 DPA10301-DPB14901 DPA10301-DPB15501 DPA10301-DPB16501 DPA10301-DPB17501 DPA10301-DPB18001 DPA10401-DPB10101 DPA10401-DPB10201 DPA10401-DPB10202 DPA10401-DPB10402 DPA10401-DPB10501 DPA10401-DPB110501 DPA10401-DPB14901
KEPPYLWNGFELIPDKWTVQ

SEQ ID NO: 6472 - protein, 20 aa, synthetic construct
  source 1..20: note = Seed: KEPPFLWMGYELHPDKWTVQ; note = HLAs: DRB1_0101 DPA10103-DPB10101 DPA10103-DPB10201 DPA10103-DPB10202 DPA10103-DPB10401 DPA10103-DPB10402 DPA10103-DPB10501 DPA10103-DPB110501 DPA10103-DPB112601 DPA10103-DPB11501 DPA10103-DPB11601 DPA10103-DPB11801 DPA10103-DPB11901 DPA10103-DPB12301 DPA10103-DPB13101 DPA10103-DPB13401 DPA10103-DPB13901 DPA10103-DPB14001 DPA10103-DPB14101 DPA10103-DPB14801 DPA10103-DPB14901 DPA10103-DPB15001 DPA10103-DPB15101 DPA10103-DPB15501 DPA10103-DPB15901 DPA10103-DPB18001 DPA10104-DPB10101 DPA10104-DPB11501 DPA10105-DPB10101 DPA10105-DPB10401 DPA10105-DPB11801 DPA10105-DPB15001 DPA10106-DPB10101 DPA10201-DPB10101 DPA10201-DPB10201 DPA10201-DPB10202 DPA10201-DPB10401 DPA10201-DPB10501 DPA10201-DPB110601 DPA10201-DPB11501 DPA10201-DPB11601 DPA10201-DPB11901 DPA10201-DPB13401 DPA10201-DPB15501 DPA10202-DPB10101 DPA10202-DPB10201 DPA10202-DPB10202 DPA10202-DPB10401 DPA10202-DPB10501 DPA10202-DPB110601 DPA10202-DPB11101 DPA10202-DPB11301 DPA10202-DPB11801 DPA10202-DPB11901 DPA10202-DPB13101; note = HLAs: DPA10202-DPB13801 DPA10202-DPB15501 DPA10202-DPB16501 DPA10301-DPB10101 DPA10301-DPB10201 DPA10301-DPB10202 DPA10301-DPB10401 DPA10301-DPB10402 DPA10301-DPB110501 DPA10301-DPB110601 DPA10301-DPB11101 DPA10301-DPB11301 DPA10301-DPB11801 DPA10301-DPB12301 DPA10301-DPB13901 DPA10301-DPB14001 DPA10301-DPB14901 DPA10301-DPB15501 DPA10301-DPB16501 DPA10301-DPB17501 DPA10301-DPB18001 DPA10401-DPB10101 DPA10401-DPB10201 DPA10401-DPB10202 DPA10401-DPB10402 DPA10401-DPB10501 DPA10401-DPB110501 DPA10401-DPB14901
KEPPYLWAGFELMPDKWTVQ

SEQ ID NO: 6473 - protein, 20 aa, synthetic construct
  source 1..20: note = Seed: KEPPFLWMGYELHPDKWTVQ; note = HLAs: DRB1_0101 DPA10103-DPB10101 DPA10103-DPB10201 DPA10103-DPB10202 DPA10103-DPB10401 DPA10103-DPB10402 DPA10103-DPB10501 DPA10103-DPB110501 DPA10103-DPB112601 DPA10103-DPB11501 DPA10103-DPB11601 DPA10103-DPB11801 DPA10103-DPB11901 DPA10103-DPB12301 DPA10103-DPB13101 DPA10103-DPB13401 DPA10103-DPB13901 DPA10103-DPB14001 DPA10103-DPB14101 DPA10103-DPB14801 DPA10103-DPB14901 DPA10103-DPB15001 DPA10103-DPB15101 DPA10103-DPB15501 DPA10103-DPB15901 DPA10103-DPB18001 DPA10104-DPB10101 DPA10104-DPB11501 DPA10105-DPB10101 DPA10105-DPB10401 DPA10105-DPB11801 DPA10105-DPB15001 DPA10106-DPB10101 DPA10201-DPB10101 DPA10201-DPB10201 DPA10201-DPB10202 DPA10201-DPB10401 DPA10201-DPB10501 DPA10201-DPB110601 DPA10201-DPB11501 DPA10201-DPB11601 DPA10201-DPB11901 DPA10201-DPB13401 DPA10201-DPB15501 DPA10202-DPB10101 DPA10202-DPB10201 DPA10202-DPB10202 DPA10202-DPB10401 DPA10202-DPB10501 DPA10202-DPB110601 DPA10202-DPB11101 DPA10202-DPB11301 DPA10202-DPB11801 DPA10202-DPB11901 DPA10202-DPB13101; note = HLAs: DPA10202-DPB13801 DPA10202-DPB15501 DPA10202-DPB16501 DPA10301-DPB10101 DPA10301-DPB10201 DPA10301-DPB10202 DPA10301-DPB10401 DPA10301-DPB10402 DPA10301-DPB110501 DPA10301-DPB110601 DPA10301-DPB11101 DPA10301-DPB11301 DPA10301-DPB11801 DPA10301-DPB12301 DPA10301-DPB13901 DPA10301-DPB14001 DPA10301-DPB14901 DPA10301-DPB15501 DPA10301-DPB16501 DPA10301-DPB17501 DPA10301-DPB18001 DPA10401-DPB10101 DPA10401-DPB10201 DPA10401-DPB10202 DPA10401-DPB10402 DPA10401-DPB10501 DPA10401-DPB110501 DPA10401-DPB14901
KEPPFLWSGLELLPDKWTVQ

SEQ ID NO: 6474 - protein, 20 aa, synthetic construct
  source 1..20: note = Seed: KEPPFLWMGYELHPDKWTVQ; note = HLAs: DPA10103-DPB10101 DPA10103-DPB10201 DPA10103-DPB10202 DPA10103-DPB10401 DPA10103-DPB10402 DPA10103-DPB10501 DPA10103-DPB110501 DPA10103-DPB112601 DPA10103-DPB11501 DPA10103-DPB11601 DPA10103-DPB11801 DPA10103-DPB11901 DPA10103-DPB12301 DPA10103-DPB13101 DPA10103-DPB13401 DPA10103-DPB13901 DPA10103-DPB14001 DPA10103-DPB14101 DPA10103-DPB14801 DPA10103-DPB14901 DPA10103-DPB15001 DPA10103-DPB15101 DPA10103-DPB15501 DPA10103-DPB15901 DPA10103-DPB18001 DPA10104-DPB10101 DPA10104-DPB11501 DPA10105-DPB10101 DPA10105-DPB10401 DPA10105-DPB11801 DPA10105-DPB15001 DPA10106-DPB10101 DPA10201-DPB10101 DPA10201-DPB10201 DPA10201-DPB10202 DPA10201-DPB10401 DPA10201-DPB10501 DPA10201-DPB110601 DPA10201-DPB11501 DPA10201-DPB11601 DPA10201-DPB11901 DPA10201-DPB13401 DPA10201-DPB15501 DPA10202-DPB10101 DPA10202-DPB10201 DPA10202-DPB10202 DPA10202-DPB10401 DPA10202-DPB10501 DPA10202-DPB110601 DPA10202-DPB11101 DPA10202-DPB11301 DPA10202-DPB11801 DPA10202-DPB11901 DPA10202-DPB13101 DPA10202-DPB13801; note = HLAs: DPA10202-DPB15501 DPA10202-DPB16501 DPA10301-DPB10101 DPA10301-DPB10201 DPA10301-DPB10202 DPA10301-DPB10401 DPA10301-DPB10402 DPA10301-DPB110501 DPA10301-DPB110601 DPA10301-DPB11101 DPA10301-DPB11301 DPA10301-DPB11801 DPA10301-DPB12301 DPA10301-DPB13901 DPA10301-DPB14001 DPA10301-DPB14901 DPA10301-DPB15501 DPA10301-DPB16501 DPA10301-DPB17501 DPA10301-DPB18001 DPA10401-DPB10101 DPA10401-DPB10201 DPA10401-DPB10202 DPA10401-DPB10402 DPA10401-DPB10501 DPA10401-DPB110501 DPA10401-DPB14901
KEPPLLWHGFELIPDKWTVQ

SEQ ID NO: 6475 - protein, 20 aa, synthetic construct
  source 1..20: note = Seed: KEPPFLWMGYELHPDKWTVQ; note = HLAs: DPA10103-DPB10101 DPA10103-DPB10201 DPA10103-DPB10202 DPA10103-DPB10401 DPA10103-DPB10402 DPA10103-DPB10501 DPA10103-DPB110501 DPA10103-DPB112601 DPA10103-DPB11501 DPA10103-DPB11601 DPA10103-DPB11801 DPA10103-DPB11901 DPA10103-DPB12301 DPA10103-DPB13101 DPA10103-DPB13401 DPA10103-DPB13901 DPA10103-DPB14001 DPA10103-DPB14101 DPA10103-DPB14801 DPA10103-DPB14901 DPA10103-DPB15001 DPA10103-DPB15101 DPA10103-DPB15501 DPA10103-DPB15901 DPA10103-DPB18001 DPA10104-DPB10101 DPA10104-DPB11501 DPA10105-DPB10101 DPA10105-DPB10401 DPA10105-DPB11801 DPA10105-DPB15001 DPA10106-DPB10101 DPA10201-DPB10101 DPA10201-DPB10201 DPA10201-DPB10202 DPA10201-DPB10401 DPA10201-DPB10501 DPA10201-DPB110601 DPA10201-DPB11501 DPA10201-DPB11601 DPA10201-DPB11901 DPA10201-DPB13401 DPA10201-DPB15501 DPA10202-DPB10101 DPA10202-DPB10201 DPA10202-DPB10202 DPA10202-DPB10401 DPA10202-DPB10501 DPA10202-DPB110601 DPA10202-DPB11101 DPA10202-DPB11301 DPA10202-DPB11801 DPA10202-DPB11901 DPA10202-DPB13101 DPA10202-DPB13801; note = HLAs: DPA10202-DPB15501 DPA10202-DPB16501 DPA10301-DPB10101 DPA10301-DPB10201 DPA10301-DPB10202 DPA10301-DPB10401 DPA10301-DPB10402 DPA10301-DPB110501 DPA10301-DPB110601 DPA10301-DPB11101 DPA10301-DPB11301 DPA10301-DPB11801 DPA10301-DPB12301 DPA10301-DPB13901 DPA10301-DPB14001 DPA10301-DPB14901 DPA10301-DPB15501 DPA10301-DPB16501 DPA10301-DPB17501 DPA10301-DPB18001 DPA10401-DPB10101 DPA10401-DPB10201 DPA10401-DPB10202 DPA10401-DPB10402 DPA10401-DPB10501 DPA10401-DPB110501 DPA10401-DPB14901
KEPPFLWTGFELQPDKWTVQ

SEQ ID NO: 6476 - protein, 20 aa, synthetic construct
  source 1..20: note = Seed: KEPPFLWMGYELHPDKWTVQ; note = HLAs: DRB1_0101 DPA10103-DPB10101 DPA10103-DPB10201 DPA10103-DPB10202 DPA10103-DPB10401 DPA10103-DPB10402 DPA10103-DPB10501 DPA10103-DPB110501 DPA10103-DPB112601 DPA10103-DPB11501 DPA10103-DPB11601 DPA10103-DPB11801 DPA10103-DPB11901 DPA10103-DPB12301 DPA10103-DPB13101 DPA10103-DPB13401 DPA10103-DPB13901 DPA10103-DPB14001 DPA10103-DPB14101 DPA10103-DPB14801 DPA10103-DPB14901 DPA10103-DPB15001 DPA10103-DPB15101 DPA10103-DPB15501 DPA10103-DPB15901 DPA10103-DPB18001 DPA10104-DPB10101 DPA10104-DPB11501 DPA10105-DPB10101 DPA10105-DPB10401 DPA10105-DPB11801 DPA10105-DPB15001 DPA10106-DPB10101 DPA10201-DPB10101 DPA10201-DPB10201 DPA10201-DPB10202 DPA10201-DPB10401 DPA10201-DPB10501 DPA10201-DPB110601 DPA10201-DPB11501 DPA10201-DPB11601 DPA10201-DPB11901 DPA10201-DPB13401 DPA10201-DPB15501 DPA10202-DPB10101 DPA10202-DPB10201 DPA10202-DPB10202 DPA10202-DPB10401 DPA10202-DPB10501 DPA10202-DPB110601 DPA10202-DPB11101 DPA10202-DPB11301 DPA10202-DPB11801 DPA10202-DPB11901 DPA10202-DPB13101; note = HLAs: DPA10202-DPB13801 DPA10202-DPB15501 DPA10202-DPB16501 DPA10301-DPB10101 DPA10301-DPB10201 DPA10301-DPB10202 DPA10301-DPB10401 DPA10301-DPB10402 DPA10301-DPB110501 DPA10301-DPB110601 DPA10301-DPB11101 DPA10301-DPB11301 DPA10301-DPB11801 DPA10301-DPB12301 DPA10301-DPB13901 DPA10301-DPB14001 DPA10301-DPB14901 DPA10301-DPB15501 DPA10301-DPB16501 DPA10301-DPB17501 DPA10301-DPB18001 DPA10401-DPB10101 DPA10401-DPB10201 DPA10401-DPB10202 DPA10401-DPB10402 DPA10401-DPB10501 DPA10401-DPB110501 DPA10401-DPB14901
KEPPFLWSGYELFPDKWTVQ

SEQ ID NO: 6477 - protein, 20 aa, synthetic construct
  source 1..20: note = Seed: KEPPFLWMGYELHPDKWTVQ; note = HLAs: DRB1_0101 DPA10103-DPB10101 DPA10103-DPB10201 DPA10103-DPB10202 DPA10103-DPB10401 DPA10103-DPB10402 DPA10103-DPB10501 DPA10103-DPB110501 DPA10103-DPB112601 DPA10103-DPB11501 DPA10103-DPB11601 DPA10103-DPB11801 DPA10103-DPB11901 DPA10103-DPB12301 DPA10103-DPB13101 DPA10103-DPB13401 DPA10103-DPB13901 DPA10103-DPB14001 DPA10103-DPB14101 DPA10103-DPB14801 DPA10103-DPB14901 DPA10103-DPB15001 DPA10103-DPB15101 DPA10103-DPB15501 DPA10103-DPB15901 DPA10103-DPB18001 DPA10104-DPB10101 DPA10104-DPB11501 DPA10105-DPB10101 DPA10105-DPB10401 DPA10105-DPB11801 DPA10105-DPB15001 DPA10106-DPB10101 DPA10201-DPB10101 DPA10201-DPB10201 DPA10201-DPB10202 DPA10201-DPB10401 DPA10201-DPB10501 DPA10201-DPB110601 DPA10201-DPB11501 DPA10201-DPB11601 DPA10201-DPB11901 DPA10201-DPB13401 DPA10201-DPB15501 DPA10202-DPB10101 DPA10202-DPB10201 DPA10202-DPB10202 DPA10202-DPB10401 DPA10202-DPB10501 DPA10202-DPB110601 DPA10202-DPB11101 DPA10202-DPB11301 DPA10202-DPB11801 DPA10202-DPB11901 DPA10202-DPB13101; note = HLAs: DPA10202-DPB13801 DPA10202-DPB15501 DPA10202-DPB16501 DPA10301-DPB10101 DPA10301-DPB10201 DPA10301-DPB10202 DPA10301-DPB10401 DPA10301-DPB10402 DPA10301-DPB110501 DPA10301-DPB110601 DPA10301-DPB11101 DPA10301-DPB11301 DPA10301-DPB11801 DPA10301-DPB12301 DPA10301-DPB13901 DPA10301-DPB14001 DPA10301-DPB14901 DPA10301-DPB15501 DPA10301-DPB16501 DPA10301-DPB17501 DPA10301-DPB18001 DPA10401-DPB10101 DPA10401-DPB10201 DPA10401-DPB10202 DPA10401-DPB10402 DPA10401-DPB10501 DPA10401-DPB110501 DPA10401-DPB14901
KEPPLLWSGFELAPDKWTVQ

SEQ ID NO: 6478 - protein, 14 aa, synthetic construct
  source 1..14: note = Seed: PPFLWMGYELHPDK; note = HLAs: DRB1_1001 DPA10103-DPB10101 DPA10103-DPB10201 DPA10103-DPB10202 DPA10103-DPB10401 DPA10103-DPB112601 DPA10103-DPB11501 DPA10103-DPB11601 DPA10103-DPB11901 DPA10103-DPB12301 DPA10103-DPB13101 DPA10103-DPB13401 DPA10103-DPB13901 DPA10103-DPB14001 DPA10103-DPB14101 DPA10103-DPB14801 DPA10103-DPB15001 DPA10103-DPB15901 DPA10104-DPB10101 DPA10104-DPB11501 DPA10105-DPB10101 DPA10105-DPB10401 DPA10105-DPB15001 DPA10106-DPB10101 DPA10201-DPB10101 DPA10201-DPB110601 DPA10201-DPB11501 DPA10201-DPB11601 DPA10201-DPB11901 DPA10202-DPB10101 DPA10202-DPB10201 DPA10202-DPB10202 DPA10202-DPB10401 DPA10202-DPB110601 DPA10202-DPB11901 DPA10202-DPB13101 DPA10202-DPB16501 DPA10301-DPB10101 DPA10301-DPB10201 DPA10301-DPB10202 DPA10301-DPB10401 DPA10301-DPB10402 DPA10301-DPB110501 DPA10301-DPB110601 DPA10301-DPB11801 DPA10301-DPB12301 DPA10301-DPB13901 DPA10301-DPB14001 DPA10301-DPB14901 DPA10301-DPB15501 DPA10301-DPB16501 DPA10301-DPB17501 DPA10301-DPB18001 DPA10401-DPB10101 DPA10401-DPB10201; note = HLAs: DPA10401-DPB10202 DPA10401-DPB10402 DPA10401-DPB10501 DPA10401-DPB110501 DPA10401-DPB14901
PPFLWLGYELVPDK

SEQ ID NO: 6479 - protein, 14 aa, synthetic construct
  source 1..14: note = Seed: PPFLWMGYELHPDK; note = HLAs: DPA10103-DPB10101 DPA10103-DPB10201 DPA10103-DPB10202 DPA10103-DPB10401 DPA10103-DPB112601 DPA10103-DPB11501 DPA10103-DPB11601 DPA10103-DPB11901 DPA10103-DPB12301 DPA10103-DPB13101 DPA10103-DPB13401 DPA10103-DPB13901 DPA10103-DPB14001 DPA10103-DPB14101 DPA10103-DPB14801 DPA10103-DPB15001 DPA10103-DPB15901 DPA10104-DPB10101 DPA10104-DPB11501 DPA10105-DPB10101 DPA10105-DPB10401 DPA10105-DPB15001 DPA10106-DPB10101 DPA10201-DPB10101 DPA10201-DPB110601 DPA10201-DPB11501 DPA10201-DPB11601 DPA10201-DPB11901 DPA10202-DPB10101 DPA10202-DPB10201 DPA10202-DPB10202 DPA10202-DPB10401 DPA10202-DPB110601 DPA10202-DPB11901 DPA10202-DPB13101 DPA10202-DPB16501 DPA10301-DPB10101 DPA10301-DPB10201 DPA10301-DPB10202 DPA10301-DPB10401 DPA10301-DPB10402 DPA10301-DPB110501 DPA10301-DPB110601 DPA10301-DPB11801 DPA10301-DPB12301 DPA10301-DPB13901 DPA10301-DPB14001 DPA10301-DPB14901 DPA10301-DPB15501 DPA10301-DPB16501 DPA10301-DPB17501 DPA10301-DPB18001 DPA10401-DPB10101 DPA10401-DPB10201; note = HLAs: DPA10401-DPB10202 DPA10401-DPB10402 DPA10401-DPB10501 DPA10401-DPB110501 DPA10401-DPB14901
PPFLWIGFELHPDK

SEQ ID NO: 6480 - protein, 20 aa, synthetic construct
  source 1..20: note = Seed: KEPPFLWMGYELHPDKWTVQ; note = HLAs: DPA10103-DPB10101 DPA10103-DPB10201 DPA10103-DPB10202 DPA10103-DPB10401 DPA10103-DPB10402 DPA10103-DPB10501 DPA10103-DPB110501 DPA10103-DPB112601 DPA10103-DPB11501 DPA10103-DPB11601 DPA10103-DPB11801 DPA10103-DPB11901 DPA10103-DPB12301 DPA10103-DPB13101 DPA10103-DPB13401 DPA10103-DPB13901 DPA10103-DPB14001 DPA10103-DPB14101 DPA10103-DPB14801 DPA10103-DPB14901 DPA10103-DPB15001 DPA10103-DPB15101 DPA10103-DPB15501 DPA10103-DPB15901 DPA10103-DPB18001 DPA10104-DPB10101 DPA10104-DPB11501 DPA10105-DPB10101 DPA10105-DPB10401 DPA10105-DPB11801 DPA10105-DPB15001 DPA10106-DPB10101 DPA10201-DPB10101 DPA10201-DPB10201 DPA10201-DPB10202 DPA10201-DPB10401 DPA10201-DPB10501 DPA10201-DPB110601 DPA10201-DPB11501 DPA10201-DPB11601 DPA10201-DPB11901 DPA10201-DPB13401 DPA10201-DPB15501 DPA10202-DPB10101 DPA10202-DPB10201 DPA10202-DPB10202 DPA10202-DPB10401 DPA10202-DPB10501 DPA10202-DPB110601 DPA10202-DPB11101 DPA10202-DPB11301 DPA10202-DPB11801 DPA10202-DPB11901 DPA10202-DPB13101 DPA10202-DPB13801; note = HLAs: DPA10202-DPB15501 DPA10202-DPB16501 DPA10301-DPB10101 DPA10301-DPB10201 DPA10301-DPB10202 DPA10301-DPB10401 DPA10301-DPB10402 DPA10301-DPB110501 DPA10301-DPB110601 DPA10301-DPB11801 DPA10301-DPB12301 DPA10301-DPB13901 DPA10301-DPB14001 DPA10301-DPB14901 DPA10301-DPB16501 DPA10301-DPB17501 DPA10301-DPB18001 DPA10401-DPB10101 DPA10401-DPB10201 DPA10401-DPB10202 DPA10401-DPB10402 DPA10401-DPB10501 DPA10401-DPB110501 DPA10401-DPB14901
KEPPFLWRGFELLPDKWTVQ

SEQ ID NO: 6481 - protein, 14 aa, synthetic construct
  source 1..14: note = Seed: PPFLWMGYELHPDK; note = HLAs: DPA10103-DPB10101 DPA10103-DPB10201 DPA10103-DPB10202 DPA10103-DPB10401 DPA10103-DPB112601 DPA10103-DPB11501 DPA10103-DPB11601 DPA10103-DPB11901 DPA10103-DPB12301 DPA10103-DPB13101 DPA10103-DPB13401 DPA10103-DPB13901 DPA10103-DPB14001 DPA10103-DPB14101 DPA10103-DPB14801 DPA10103-DPB15001 DPA10103-DPB15901 DPA10104-DPB10101 DPA10104-DPB11501 DPA10105-DPB10101 DPA10105-DPB10401 DPA10105-DPB15001 DPA10106-DPB10101 DPA10201-DPB10101 DPA10201-DPB110601 DPA10201-DPB11501 DPA10201-DPB11601 DPA10201-DPB11901 DPA10202-DPB10101 DPA10202-DPB10201 DPA10202-DPB10202 DPA10202-DPB10401 DPA10202-DPB110601 DPA10202-DPB11901 DPA10202-DPB13101 DPA10202-DPB16501 DPA10301-DPB10101 DPA10301-DPB10201 DPA10301-DPB10202 DPA10301-DPB10401 DPA10301-DPB10402 DPA10301-DPB110501 DPA10301-DPB110601 DPA10301-DPB11801 DPA10301-DPB12301 DPA10301-DPB13901 DPA10301-DPB14001 DPA10301-DPB14901 DPA10301-DPB15501 DPA10301-DPB16501 DPA10301-DPB17501 DPA10301-DPB18001 DPA10401-DPB10101 DPA10401-DPB10201; note = HLAs: DPA10401-DPB10202 DPA10401-DPB10402 DPA10401-DPB10501 DPA10401-DPB110501 DPA10401-DPB14901
PPWLWHGFELVPDK

SEQ ID NO: 6482 - protein, 14 aa, synthetic construct
  source 1..14: note = Seed: PPFLWMGYELHPDK; note = HLAs: DRB1_1001 DPA10103-DPB10101 DPA10103-DPB10201 DPA10103-DPB10202 DPA10103-DPB10401 DPA10103-DPB112601 DPA10103-DPB11501 DPA10103-DPB11601 DPA10103-DPB11901 DPA10103-DPB12301 DPA10103-DPB13101 DPA10103-DPB13401 DPA10103-DPB13901 DPA10103-DPB14001 DPA10103-DPB14101 DPA10103-DPB14801 DPA10103-DPB15001 DPA10103-DPB15901 DPA10104-DPB10101 DPA10104-DPB11501 DPA10105-DPB10101 DPA10105-DPB10401 DPA10105-DPB15001 DPA10106-DPB10101 DPA10201-DPB10101 DPA10201-DPB110601 DPA10201-DPB11501 DPA10201-DPB11601 DPA10201-DPB11901 DPA10202-DPB10101 DPA10202-DPB10201 DPA10202-DPB10202 DPA10202-DPB10401 DPA10202-DPB110601 DPA10202-DPB11901 DPA10202-DPB13101 DPA10202-DPB16501 DPA10301-DPB10101 DPA10301-DPB10201 DPA10301-DPB10202 DPA10301-DPB10401 DPA10301-DPB10402 DPA10301-DPB110501 DPA10301-DPB110601 DPA10301-DPB11801 DPA10301-DPB12301 DPA10301-DPB13901 DPA10301-DPB14001 DPA10301-DPB14901 DPA10301-DPB15501 DPA10301-DPB16501 DPA10301-DPB17501 DPA10301-DPB18001 DPA10401-DPB10101 DPA10401-DPB10201; note = HLAs: DPA10401-DPB10202 DPA10401-DPB10402 DPA10401-DPB10501 DPA10401-DPB110501 DPA10401-DPB14901
PPYLWLGFELLPDK

SEQ ID NO: 6483 - protein, 14 aa, synthetic construct
  source 1..14: note = Seed: PPFLWMGYELHPDK; note = HLAs: DPA10103-DPB10101 DPA10103-DPB10201 DPA10103-DPB10202 DPA10103-DPB10401 DPA10103-DPB112601 DPA10103-DPB11501 DPA10103-DPB11601 DPA10103-DPB11901 DPA10103-DPB12301 DPA10103-DPB13101 DPA10103-DPB13401 DPA10103-DPB13901 DPA10103-DPB14001 DPA10103-DPB14101 DPA10103-DPB14801 DPA10103-DPB15001 DPA10103-DPB15901 DPA10104-DPB10101 DPA10104-DPB11501 DPA10105-DPB10101 DPA10105-DPB10401 DPA10105-DPB15001 DPA10106-DPB10101 DPA10201-DPB10101 DPA10201-DPB110601 DPA10201-DPB11501 DPA10201-DPB11601 DPA10201-DPB11901 DPA10202-DPB10101 DPA10202-DPB10201 DPA10202-DPB10202 DPA10202-DPB10401 DPA10202-DPB110601 DPA10202-DPB11901 DPA10202-DPB13101 DPA10202-DPB16501 DPA10301-DPB10101 DPA10301-DPB10201 DPA10301-DPB10202 DPA10301-DPB10401 DPA10301-DPB10402 DPA10301-DPB110501 DPA10301-DPB110601 DPA10301-DPB11801 DPA10301-DPB12301 DPA10301-DPB13901 DPA10301-DPB14001 DPA10301-DPB14901 DPA10301-DPB15501 DPA10301-DPB16501 DPA10301-DPB17501 DPA10301-DPB18001 DPA10401-DPB10101 DPA10401-DPB10201; note = HLAs: DPA10401-DPB10202 DPA10401-DPB10402 DPA10401-DPB10501 DPA10401-DPB110501 DPA10401-DPB14901
PPYLWAGFELFPDK

SEQ ID NO: 6484 - protein, 20 aa, synthetic construct
  source 1..20: note = Seed: KEPPFLWMGYELHPDKWTVQ; note = HLAs: DPA10103-DPB10101 DPA10103-DPB10201 DPA10103-DPB10202 DPA10103-DPB10401 DPA10103-DPB10402 DPA10103-DPB10501 DPA10103-DPB110501 DPA10103-DPB112601 DPA10103-DPB11501 DPA10103-DPB11601 DPA10103-DPB11801 DPA10103-DPB11901 DPA10103-DPB12301 DPA10103-DPB13101 DPA10103-DPB13401 DPA10103-DPB13901 DPA10103-DPB14001 DPA10103-DPB14101 DPA10103-DPB14801 DPA10103-DPB14901 DPA10103-DPB15001 DPA10103-DPB15101 DPA10103-DPB15501 DPA10103-DPB15901 DPA10103-DPB18001 DPA10104-DPB10101 DPA10104-DPB11501 DPA10105-DPB10101 DPA10105-DPB10401 DPA10105-DPB11801 DPA10105-DPB15001 DPA10106-DPB10101 DPA10201-DPB10101 DPA10201-DPB10201 DPA10201-DPB10202 DPA10201-DPB10401 DPA10201-DPB10501 DPA10201-DPB110601 DPA10201-DPB11501 DPA10201-DPB11601 DPA10201-DPB11901 DPA10201-DPB13401 DPA10201-DPB15501 DPA10202-DPB10101 DPA10202-DPB10201 DPA10202-DPB10202 DPA10202-DPB10401 DPA10202-DPB10501 DPA10202-DPB110601 DPA10202-DPB11101 DPA10202-DPB11301 DPA10202-DPB11801 DPA10202-DPB11901 DPA10202-DPB13101 DPA10202-DPB13801; note = HLAs: DPA10202-DPB15501 DPA10202-DPB16501 DPA10301-DPB10101 DPA10301-DPB10201 DPA10301-DPB10202 DPA10301-DPB10401 DPA10301-DPB10402 DPA10301-DPB110501 DPA10301-DPB110601 DPA10301-DPB11101 DPA10301-DPB11301 DPA10301-DPB11801 DPA10301-DPB12301 DPA10301-DPB13901 DPA10301-DPB14001 DPA10301-DPB14901 DPA10301-DPB15501 DPA10301-DPB16501 DPA10301-DPB17501 DPA10301-DPB18001 DPA10401-DPB10101 DPA10401-DPB10201 DPA10401-DPB10202 DPA10401-DPB10402 DPA10401-DPB10501 DPA10401-DPB110501 DPA10401-DPB14901
KEPPFLWKGFELFPDKWTVQ

SEQ ID NO: 6485 - protein, 14 aa, synthetic construct
  source 1..14: note = Seed: PPFLWMGYELHPDK; note = HLAs: DPA10103-DPB10101 DPA10103-DPB10201 DPA10103-DPB10202 DPA10103-DPB10401 DPA10103-DPB112601 DPA10103-DPB11501 DPA10103-DPB11601 DPA10103-DPB11901 DPA10103-DPB12301 DPA10103-DPB13101 DPA10103-DPB13401 DPA10103-DPB13901 DPA10103-DPB14001 DPA10103-DPB14101 DPA10103-DPB14801 DPA10103-DPB15001 DPA10103-DPB15901 DPA10104-DPB10101 DPA10104-DPB11501 DPA10105-DPB10101 DPA10105-DPB10401 DPA10105-DPB15001 DPA10106-DPB10101 DPA10201-DPB10101 DPA10201-DPB110601 DPA10201-DPB11501 DPA10201-DPB11601 DPA10201-DPB11901 DPA10202-DPB10101 DPA10202-DPB10201 DPA10202-DPB10202 DPA10202-DPB10401 DPA10202-DPB110601 DPA10202-DPB11901 DPA10202-DPB13101 DPA10202-DPB16501 DPA10301-DPB10101 DPA10301-DPB10201 DPA10301-DPB10202 DPA10301-DPB10401 DPA10301-DPB10402 DPA10301-DPB110501 DPA10301-DPB110601 DPA10301-DPB11801 DPA10301-DPB12301 DPA10301-DPB13901 DPA10301-DPB14001 DPA10301-DPB14901 DPA10301-DPB15501 DPA10301-DPB16501 DPA10301-DPB17501 DPA10301-DPB18001 DPA10401-DPB10101 DPA10401-DPB10201; note = HLAs: DPA10401-DPB10202 DPA10401-DPB10402 DPA10401-DPB10501 DPA10401-DPB110501 DPA10401-DPB14901
PPFLWWGFELVPDK

SEQ ID NO: 6486 - protein, 20 aa, synthetic construct
  source 1..20: note = Seed: KEPPFLWMGYELHPDKWTVQ; note = HLAs: DPA10103-DPB10101 DPA10103-DPB10201 DPA10103-DPB10202 DPA10103-DPB10401 DPA10103-DPB10402 DPA10103-DPB10501 DPA10103-DPB110501 DPA10103-DPB112601 DPA10103-DPB11501 DPA10103-DPB11601 DPA10103-DPB11801 DPA10103-DPB11901 DPA10103-DPB12301 DPA10103-DPB13101 DPA10103-DPB13401 DPA10103-DPB13901 DPA10103-DPB14001 DPA10103-DPB14101 DPA10103-DPB14801 DPA10103-DPB14901 DPA10103-DPB15001 DPA10103-DPB15101 DPA10103-DPB15501 DPA10103-DPB15901 DPA10103-DPB18001 DPA10104-DPB10101 DPA10104-DPB11501 DPA10105-DPB10101 DPA10105-DPB10401 DPA10105-DPB11801 DPA10105-DPB15001 DPA10106-DPB10101 DPA10201-DPB10101 DPA10201-DPB10201 DPA10201-DPB10202 DPA10201-DPB10401 DPA10201-DPB10501 DPA10201-DPB110601 DPA10201-DPB11501 DPA10201-DPB11601 DPA10201-DPB11901 DPA10201-DPB13401 DPA10201-DPB15501 DPA10202-DPB10101 DPA10202-DPB10201 DPA10202-DPB10202 DPA10202-DPB10401 DPA10202-DPB10501 DPA10202-DPB110601 DPA10202-DPB11101 DPA10202-DPB11301 DPA10202-DPB11801 DPA10202-DPB11901 DPA10202-DPB13101 DPA10202-DPB13801; note = HLAs: DPA10202-DPB15501 DPA10202-DPB16501 DPA10301-DPB10101 DPA10301-DPB10201 DPA10301-DPB10202 DPA10301-DPB10401 DPA10301-DPB10402 DPA10301-DPB110501 DPA10301-DPB110601 DPA10301-DPB11101 DPA10301-DPB11301 DPA10301-DPB11801 DPA10301-DPB12301 DPA10301-DPB13901 DPA10301-DPB14001 DPA10301-DPB14901 DPA10301-DPB15501 DPA10301-DPB16501 DPA10301-DPB17501 DPA10301-DPB18001 DPA10401-DPB10101 DPA10401-DPB10201 DPA10401-DPB10202 DPA10401-DPB10402 DPA10401-DPB10501 DPA10401-DPB110501 DPA10401-DPB14901
KEPPFLWSGFELQPDKWTVQ

SEQ ID NO: 6487 - protein, 14 aa, synthetic construct
  source 1..14: note = Seed: PPFLWMGYELHPDK; note = HLAs: DPA10103-DPB10101 DPA10103-DPB10201 DPA10103-DPB10202 DPA10103-DPB10401 DPA10103-DPB112601 DPA10103-DPB11501 DPA10103-DPB11601 DPA10103-DPB11901 DPA10103-DPB12301 DPA10103-DPB13101 DPA10103-DPB13401 DPA10103-DPB13901 DPA10103-DPB14001 DPA10103-DPB14101 DPA10103-DPB14801 DPA10103-DPB15001 DPA10103-DPB15901 DPA10104-DPB10101 DPA10104-DPB11501 DPA10105-DPB10101 DPA10105-DPB10401 DPA10105-DPB15001 DPA10106-DPB10101 DPA10201-DPB10101 DPA10201-DPB110601 DPA10201-DPB11501 DPA10201-DPB11601 DPA10201-DPB11901 DPA10202-DPB10101 DPA10202-DPB10201 DPA10202-DPB10202 DPA10202-DPB10401 DPA10202-DPB110601 DPA10202-DPB11901 DPA10202-DPB13101 DPA10202-DPB16501 DPA10301-DPB10101 DPA10301-DPB10201 DPA10301-DPB10202 DPA10301-DPB10401 DPA10301-DPB10402 DPA10301-DPB110501 DPA10301-DPB110601 DPA10301-DPB11801 DPA10301-DPB12301 DPA10301-DPB13901 DPA10301-DPB14001 DPA10301-DPB14901 DPA10301-DPB15501 DPA10301-DPB16501 DPA10301-DPB17501 DPA10301-DPB18001 DPA10401-DPB10101 DPA10401-DPB10201; note = HLAs: DPA10401-DPB10202 DPA10401-DPB10402 DPA10401-DPB10501 DPA10401-DPB110501 DPA10401-DPB14901
PPLLWQGFELVPDK

SEQ ID NO: 6488 - protein, 14 aa, synthetic construct
  source 1..14: note = Seed: PPFLWMGYELHPDK; note = HLAs: DPA10103-DPB10101 DPA10103-DPB10201 DPA10103-DPB10202 DPA10103-DPB10401 DPA10103-DPB112601 DPA10103-DPB11501 DPA10103-DPB11601 DPA10103-DPB11901 DPA10103-DPB12301 DPA10103-DPB13101 DPA10103-DPB13401 DPA10103-DPB13901 DPA10103-DPB14001 DPA10103-DPB14101 DPA10103-DPB14801 DPA10103-DPB15001 DPA10103-DPB15901 DPA10104-DPB10101 DPA10104-DPB11501 DPA10105-DPB10101 DPA10105-DPB10401 DPA10105-DPB15001 DPA10106-DPB10101 DPA10201-DPB10101 DPA10201-DPB110601 DPA10201-DPB11501 DPA10201-DPB11601 DPA10201-DPB11901 DPA10202-DPB10101 DPA10202-DPB10201 DPA10202-DPB10202 DPA10202-DPB10401 DPA10202-DPB110601 DPA10202-DPB11901 DPA10202-DPB13101 DPA10202-DPB16501 DPA10301-DPB10101 DPA10301-DPB10201 DPA10301-DPB10202 DPA10301-DPB10401 DPA10301-DPB10402 DPA10301-DPB110501 DPA10301-DPB110601 DPA10301-DPB11801 DPA10301-DPB12301 DPA10301-DPB13901 DPA10301-DPB14001 DPA10301-DPB14901 DPA10301-DPB15501 DPA10301-DPB16501 DPA10301-DPB17501 DPA10301-DPB18001 DPA10401-DPB10101 DPA10401-DPB10201; note = HLAs: DPA10401-DPB10202 DPA10401-DPB10402 DPA10401-DPB10501 DPA10401-DPB110501 DPA10401-DPB14901
PPWLWQGFELLPDK

SEQ ID NO: 6489 - protein, 14 aa, synthetic construct
  source 1..14: note = Seed: PPFLWMGYELHPDK; note = HLAs: DRB1_1001 DPA10103-DPB10101 DPA10103-DPB10201 DPA10103-DPB10202 DPA10103-DPB10401 DPA10103-DPB112601 DPA10103-DPB11501 DPA10103-DPB11601 DPA10103-DPB11901 DPA10103-DPB12301 DPA10103-DPB13101 DPA10103-DPB13401 DPA10103-DPB13901 DPA10103-DPB14001 DPA10103-DPB14101 DPA10103-DPB14801 DPA10103-DPB15001 DPA10103-DPB15901 DPA10104-DPB10101 DPA10104-DPB11501 DPA10105-DPB10101 DPA10105-DPB10401 DPA10105-DPB15001 DPA10106-DPB10101 DPA10201-DPB10101 DPA10201-DPB110601 DPA10201-DPB11501 DPA10201-DPB11601 DPA10201-DPB11901 DPA10202-DPB10101 DPA10202-DPB10201 DPA10202-DPB10202 DPA10202-DPB10401 DPA10202-DPB110601 DPA10202-DPB11901 DPA10202-DPB13101 DPA10202-DPB16501 DPA10301-DPB10101 DPA10301-DPB10201 DPA10301-DPB10202 DPA10301-DPB10401 DPA10301-DPB10402 DPA10301-DPB110501 DPA10301-DPB110601 DPA10301-DPB11801 DPA10301-DPB12301 DPA10301-DPB13901 DPA10301-DPB14001 DPA10301-DPB14901 DPA10301-DPB15501 DPA10301-DPB16501 DPA10301-DPB17501 DPA10301-DPB18001 DPA10401-DPB10101 DPA10401-DPB10201; note = HLAs: DPA10401-DPB10202 DPA10401-DPB10402 DPA10401-DPB10501 DPA10401-DPB110501 DPA10401-DPB14901
PPFLWMGYELLPDK

SEQ ID NO: 6490 - protein, 20 aa, synthetic construct
  source 1..20: note = Seed: KEPPFLWMGYELHPDKWTVQ; note = HLAs: DRB1_0101 DPA10103-DPB10101 DPA10103-DPB10201 DPA10103-DPB10202 DPA10103-DPB10401 DPA10103-DPB10402 DPA10103-DPB10501 DPA10103-DPB110501 DPA10103-DPB112601 DPA10103-DPB11501 DPA10103-DPB11601 DPA10103-DPB11801 DPA10103-DPB11901 DPA10103-DPB12301 DPA10103-DPB13101 DPA10103-DPB13401 DPA10103-DPB13901 DPA10103-DPB14001 DPA10103-DPB14101 DPA10103-DPB14801 DPA10103-DPB14901 DPA10103-DPB15001 DPA10103-DPB15101 DPA10103-DPB15501 DPA10103-DPB15901 DPA10103-DPB18001 DPA10104-DPB10101 DPA10104-DPB11501 DPA10105-DPB10101 DPA10105-DPB10401 DPA10105-DPB11801 DPA10105-DPB15001 DPA10106-DPB10101 DPA10201-DPB10101 DPA10201-DPB10201 DPA10201-DPB10202 DPA10201-DPB10401 DPA10201-DPB10501 DPA10201-DPB110601 DPA10201-DPB11501 DPA10201-DPB11601 DPA10201-DPB11901 DPA10201-DPB13401 DPA10201-DPB15501 DPA10202-DPB10101 DPA10202-DPB10201 DPA10202-DPB10202 DPA10202-DPB10401 DPA10202-DPB10501 DPA10202-DPB110601 DPA10202-DPB11101 DPA10202-DPB11301 DPA10202-DPB11801 DPA10202-DPB11901 DPA10202-DPB13101; note = HLAs: DPA10202-DPB13801 DPA10202-DPB15501 DPA10202-DPB16501 DPA10301-DPB10101 DPA10301-DPB10201 DPA10301-DPB10202 DPA10301-DPB10401 DPA10301-DPB10402 DPA10301-DPB110501 DPA10301-DPB110601 DPA10301-DPB11101 DPA10301-DPB11301 DPA10301-DPB11801 DPA10301-DPB12301 DPA10301-DPB13901 DPA10301-DPB14001 DPA10301-DPB14901 DPA10301-DPB15501 DPA10301-DPB16501 DPA10301-DPB17501 DPA10301-DPB18001 DPA10401-DPB10101 DPA10401-DPB10201 DPA10401-DPB10202 DPA10401-DPB10402 DPA10401-DPB10501 DPA10401-DPB110501 DPA10401-DPB14901
KEPPFLWAGWELIPDKWTVQ

SEQ ID NO: 6491 - protein, 20 aa, synthetic construct
  source 1..20: note = Seed: KEPPFLWMGYELHPDKWTVQ; note = HLAs: DRB1_0101 DRB1_1001 DPA10103-DPB10101 DPA10103-DPB10201 DPA10103-DPB10202 DPA10103-DPB10401 DPA10103-DPB10402 DPA10103-DPB10501 DPA10103-DPB110501 DPA10103-DPB112601 DPA10103-DPB11501 DPA10103-DPB11601 DPA10103-DPB11801 DPA10103-DPB11901 DPA10103-DPB12301 DPA10103-DPB13101 DPA10103-DPB13401 DPA10103-DPB13901 DPA10103-DPB14001 DPA10103-DPB14101 DPA10103-DPB14801 DPA10103-DPB14901 DPA10103-DPB15001 DPA10103-DPB15101 DPA10103-DPB15501 DPA10103-DPB15901 DPA10103-DPB18001 DPA10104-DPB10101 DPA10104-DPB11501 DPA10105-DPB10101 DPA10105-DPB10401 DPA10105-DPB11801 DPA10105-DPB15001 DPA10106-DPB10101 DPA10201-DPB10101 DPA10201-DPB10201 DPA10201-DPB10202 DPA10201-DPB10401 DPA10201-DPB10501 DPA10201-DPB110601 DPA10201-DPB11501 DPA10201-DPB11601 DPA10201-DPB11901 DPA10201-DPB13401 DPA10201-DPB15501 DPA10202-DPB10101 DPA10202-DPB10201 DPA10202-DPB10202 DPA10202-DPB10401 DPA10202-DPB10501 DPA10202-DPB110601 DPA10202-DPB11101 DPA10202-DPB11301 DPA10202-DPB11801 DPA10202-DPB11901; note = HLAs: DPA10202-DPB13101 DPA10202-DPB13801 DPA10202-DPB15501 DPA10202-DPB16501 DPA10301-DPB10101 DPA10301-DPB10201 DPA10301-DPB10202 DPA10301-DPB10401 DPA10301-DPB10402 DPA10301-DPB110501 DPA10301-DPB110601 DPA10301-DPB11101 DPA10301-DPB11301 DPA10301-DPB11801 DPA10301-DPB12301 DPA10301-DPB13901 DPA10301-DPB14001 DPA10301-DPB14901 DPA10301-DPB15501 DPA10301-DPB16501 DPA10301-DPB17501 DPA10301-DPB18001 DPA10401-DPB10101 DPA10401-DPB10201 DPA10401-DPB10202 DPA10401-DPB10402 DPA10401-DPB10501 DPA10401-DPB110501 DPA10401-DPB14901
KEPPFLWVGFELSPDKWTVQ

SEQ ID NO: 6492 - protein, 14 aa, synthetic construct
  source 1..14: note = Seed: PPFLWMGYELHPDK; note = HLAs: DRB1_1001 DPA10103-DPB10101 DPA10103-DPB10201 DPA10103-DPB10202 DPA10103-DPB10401 DPA10103-DPB112601 DPA10103-DPB11501 DPA10103-DPB11601 DPA10103-DPB11901 DPA10103-DPB12301 DPA10103-DPB13101 DPA10103-DPB13401 DPA10103-DPB13901 DPA10103-DPB14001 DPA10103-DPB14101 DPA10103-DPB14801 DPA10103-DPB15001 DPA10103-DPB15901 DPA10104-DPB10101 DPA10104-DPB11501 DPA10105-DPB10101 DPA10105-DPB10401 DPA10105-DPB15001 DPA10106-DPB10101 DPA10201-DPB10101 DPA10201-DPB110601 DPA10201-DPB11501 DPA10201-DPB11601 DPA10201-DPB11901 DPA10202-DPB10101 DPA10202-DPB10201 DPA10202-DPB10202 DPA10202-DPB10401 DPA10202-DPB110601 DPA10202-DPB11901 DPA10202-DPB13101 DPA10202-DPB16501 DPA10301-DPB10101 DPA10301-DPB10201 DPA10301-DPB10202 DPA10301-DPB10401 DPA10301-DPB10402 DPA10301-DPB110501 DPA10301-DPB110601 DPA10301-DPB11801 DPA10301-DPB12301 DPA10301-DPB13901 DPA10301-DPB14001 DPA10301-DPB14901 DPA10301-DPB15501 DPA10301-DPB16501 DPA10301-DPB17501 DPA10301-DPB18001 DPA10401-DPB10101 DPA10401-DPB10201; note = HLAs: DPA10401-DPB10202 DPA10401-DPB10402 DPA10401-DPB10501 DPA10401-DPB110501 DPA10401-DPB14901
PPYLWTGFELAPDK

SEQ ID NO: 6493 - protein, 20 aa, synthetic construct
  source 1..20: note = Seed: KEPPFLWMGYELHPDKWTVQ; note = HLAs: DRB1_1001 DPA10103-DPB10101 DPA10103-DPB10201 DPA10103-DPB10202 DPA10103-DPB10401 DPA10103-DPB10402 DPA10103-DPB10501 DPA10103-DPB110501 DPA10103-DPB112601 DPA10103-DPB11501 DPA10103-DPB11601 DPA10103-DPB11801 DPA10103-DPB11901 DPA10103-DPB12301 DPA10103-DPB13101 DPA10103-DPB13401 DPA10103-DPB13901 DPA10103-DPB14001 DPA10103-DPB14101 DPA10103-DPB14801 DPA10103-DPB14901 DPA10103-DPB15001 DPA10103-DPB15101 DPA10103-DPB15501 DPA10103-DPB15901 DPA10103-DPB18001 DPA10104-DPB10101 DPA10104-DPB11501 DPA10105-DPB10101 DPA10105-DPB10401 DPA10105-DPB11801 DPA10105-DPB15001 DPA10106-DPB10101 DPA10201-DPB10101 DPA10201-DPB10201 DPA10201-DPB10202 DPA10201-DPB10401 DPA10201-DPB10501 DPA10201-DPB110601 DPA10201-DPB11501 DPA10201-DPB11601 DPA10201-DPB11901 DPA10201-DPB13401 DPA10201-DPB15501 DPA10202-DPB10101 DPA10202-DPB10201 DPA10202-DPB10202 DPA10202-DPB10401 DPA10202-DPB10501 DPA10202-DPB110601 DPA10202-DPB11101 DPA10202-DPB11301 DPA10202-DPB11801 DPA10202-DPB11901 DPA10202-DPB13101; note = HLAs: DPA10202-DPB13801 DPA10202-DPB15501 DPA10202-DPB16501 DPA10301-DPB10101 DPA10301-DPB10201 DPA10301-DPB10202 DPA10301-DPB10401 DPA10301-DPB10402 DPA10301-DPB110501 DPA10301-DPB110601 DPA10301-DPB11101 DPA10301-DPB11301 DPA10301-DPB11801 DPA10301-DPB12301 DPA10301-DPB13901 DPA10301-DPB14001 DPA10301-DPB14901 DPA10301-DPB15501 DPA10301-DPB16501 DPA10301-DPB17501 DPA10301-DPB18001 DPA10401-DPB10101 DPA10401-DPB10201 DPA10401-DPB10202 DPA10401-DPB10402 DPA10401-DPB10501 DPA10401-DPB110501 DPA10401-DPB14901
KEPPFLWAGFELEPDKWTVQ

SEQ ID NO: 6494 - protein, 14 aa, synthetic construct
  source 1..14: note = Seed: PPFLWMGYELHPDK; note = HLAs: DPA10103-DPB10101 DPA10103-DPB10201 DPA10103-DPB10202 DPA10103-DPB10401 DPA10103-DPB112601 DPA10103-DPB11501 DPA10103-DPB11601 DPA10103-DPB11901 DPA10103-DPB12301 DPA10103-DPB13101 DPA10103-DPB13401 DPA10103-DPB13901 DPA10103-DPB14001 DPA10103-DPB14101 DPA10103-DPB14801 DPA10103-DPB15001 DPA10103-DPB15901 DPA10104-DPB10101 DPA10104-DPB11501 DPA10105-DPB10101 DPA10105-DPB10401 DPA10105-DPB15001 DPA10106-DPB10101 DPA10201-DPB10101 DPA10201-DPB110601 DPA10201-DPB11501 DPA10201-DPB11601 DPA10201-DPB11901 DPA10202-DPB10101 DPA10202-DPB10201 DPA10202-DPB10202 DPA10202-DPB10401 DPA10202-DPB110601 DPA10202-DPB11901 DPA10202-DPB13101 DPA10202-DPB16501 DPA10301-DPB10101 DPA10301-DPB10201 DPA10301-DPB10202 DPA10301-DPB10401 DPA10301-DPB10402 DPA10301-DPB110501 DPA10301-DPB110601 DPA10301-DPB11801 DPA10301-DPB12301 DPA10301-DPB13901 DPA10301-DPB14001 DPA10301-DPB14901 DPA10301-DPB15501 DPA10301-DPB16501 DPA10301-DPB17501 DPA10301-DPB18001 DPA10401-DPB10101 DPA10401-DPB10201; note = HLAs: DPA10401-DPB10202 DPA10401-DPB10402 DPA10401-DPB10501 DPA10401-DPB110501 DPA10401-DPB14901
PPFLWTGWELMPDK

SEQ ID NO: 6495 - protein, 14 aa, synthetic construct
  source 1..14: note = Seed: PPFLWMGYELHPDK; note = HLAs: DPA10103-DPB10101 DPA10103-DPB10201 DPA10103-DPB10202 DPA10103-DPB10401 DPA10103-DPB112601 DPA10103-DPB11501 DPA10103-DPB11601 DPA10103-DPB11901 DPA10103-DPB12301 DPA10103-DPB13101 DPA10103-DPB13401 DPA10103-DPB13901 DPA10103-DPB14001 DPA10103-DPB14101 DPA10103-DPB14801 DPA10103-DPB15001 DPA10103-DPB15901 DPA10104-DPB10101 DPA10104-DPB11501 DPA10105-DPB10101 DPA10105-DPB10401 DPA10105-DPB15001 DPA10106-DPB10101 DPA10201-DPB10101 DPA10201-DPB110601 DPA10201-DPB11501 DPA10201-DPB11601 DPA10201-DPB11901 DPA10202-DPB10101 DPA10202-DPB10201 DPA10202-DPB10202 DPA10202-DPB10401 DPA10202-DPB110601 DPA10202-DPB11901 DPA10202-DPB13101 DPA10202-DPB16501 DPA10301-DPB10101 DPA10301-DPB10201 DPA10301-DPB10202 DPA10301-DPB10401 DPA10301-DPB10402 DPA10301-DPB110501 DPA10301-DPB110601 DPA10301-DPB11801 DPA10301-DPB12301 DPA10301-DPB13901 DPA10301-DPB14001 DPA10301-DPB14901 DPA10301-DPB15501 DPA10301-DPB16501 DPA10301-DPB17501 DPA10301-DPB18001 DPA10401-DPB10101 DPA10401-DPB10201; note = HLAs: DPA10401-DPB10202 DPA10401-DPB10402 DPA10401-DPB10501 DPA10401-DPB110501 DPA10401-DPB14901
PPILWTGFELFPDK

SEQ ID NO: 6496 - protein, 14 aa, synthetic construct
  source 1..14: note = Seed: PPFLWMGYELHPDK; note = HLAs: DPA10103-DPB10101 DPA10103-DPB10201 DPA10103-DPB10202 DPA10103-DPB10401 DPA10103-DPB112601 DPA10103-DPB11501 DPA10103-DPB11601 DPA10103-DPB11901 DPA10103-DPB12301 DPA10103-DPB13101 DPA10103-DPB13401 DPA10103-DPB13901 DPA10103-DPB14001 DPA10103-DPB14101 DPA10103-DPB14801 DPA10103-DPB15001 DPA10103-DPB15901 DPA10104-DPB10101 DPA10104-DPB11501 DPA10105-DPB10101 DPA10105-DPB10401 DPA10105-DPB15001 DPA10106-DPB10101 DPA10201-DPB10101 DPA10201-DPB110601 DPA10201-DPB11501 DPA10201-DPB11601 DPA10201-DPB11901 DPA10202-DPB10101 DPA10202-DPB10201 DPA10202-DPB10202 DPA10202-DPB10401 DPA10202-DPB110601 DPA10202-DPB11901 DPA10202-DPB13101 DPA10202-DPB16501 DPA10301-DPB10101 DPA10301-DPB10201 DPA10301-DPB10202 DPA10301-DPB10401 DPA10301-DPB10402 DPA10301-DPB110501 DPA10301-DPB110601 DPA10301-DPB11801 DPA10301-DPB12301 DPA10301-DPB13901 DPA10301-DPB14001 DPA10301-DPB14901 DPA10301-DPB15501 DPA10301-DPB16501 DPA10301-DPB17501 DPA10301-DPB18001 DPA10401-DPB10101 DPA10401-DPB10201; note = HLAs: DPA10401-DPB10202 DPA10401-DPB10402 DPA10401-DPB10501 DPA10401-DPB110501 DPA10401-DPB14901
PPLLWVGFELIPDK

SEQ ID NO: 6497 - protein, 20 aa, synthetic construct
  source 1..20: note = Seed: KEPPFLWMGYELHPDKWTVQ; note = HLAs: DPA10103-DPB10101 DPA10103-DPB10201 DPA10103-DPB10202 DPA10103-DPB10401 DPA10103-DPB10402 DPA10103-DPB10501 DPA10103-DPB110501 DPA10103-DPB112601 DPA10103-DPB11501 DPA10103-DPB11601 DPA10103-DPB11801 DPA10103-DPB11901 DPA10103-DPB12301 DPA10103-DPB13101 DPA10103-DPB13401 DPA10103-DPB13901 DPA10103-DPB14001 DPA10103-DPB14101 DPA10103-DPB14801 DPA10103-DPB14901 DPA10103-DPB15001 DPA10103-DPB15101 DPA10103-DPB15501 DPA10103-DPB15901 DPA10103-DPB18001 DPA10104-DPB10101 DPA10104-DPB11501 DPA10105-DPB10101 DPA10105-DPB10401 DPA10105-DPB11801 DPA10105-DPB15001 DPA10106-DPB10101 DPA10201-DPB10101 DPA10201-DPB10201 DPA10201-DPB10202 DPA10201-DPB10401 DPA10201-DPB10501 DPA10201-DPB110601 DPA10201-DPB11501 DPA10201-DPB11601 DPA10201-DPB11901 DPA10201-DPB13401 DPA10201-DPB15501 DPA10202-DPB10101 DPA10202-DPB10201 DPA10202-DPB10202 DPA10202-DPB10401 DPA10202-DPB10501 DPA10202-DPB110601 DPA10202-DPB11101 DPA10202-DPB11301 DPA10202-DPB11801 DPA10202-DPB11901 DPA10202-DPB13101 DPA10202-DPB13801; note = HLAs: DPA10202-DPB15501 DPA10202-DPB16501 DPA10301-DPB10101 DPA10301-DPB10201 DPA10301-DPB10202 DPA10301-DPB10401 DPA10301-DPB10402 DPA10301-DPB110501 DPA10301-DPB110601 DPA10301-DPB11101 DPA10301-DPB11301 DPA10301-DPB11801 DPA10301-DPB12301 DPA10301-DPB13901 DPA10301-DPB14001 DPA10301-DPB14901 DPA10301-DPB15501 DPA10301-DPB16501 DPA10301-DPB17501 DPA10301-DPB18001 DPA10401-DPB10101 DPA10401-DPB10201 DPA10401-DPB10202 DPA10401-DPB10402 DPA10401-DPB10501 DPA10401-DPB110501 DPA10401-DPB14901
KEPPILWSGFELMPDKWTVQ

SEQ ID NO: 6498 - protein, 14 aa, synthetic construct
  source 1..14: note = Seed: PPFLWMGYELHPDK; note = HLAs: DPA10103-DPB10101 DPA10103-DPB10201 DPA10103-DPB10202 DPA10103-DPB10401 DPA10103-DPB112601 DPA10103-DPB11501 DPA10103-DPB11601 DPA10103-DPB11901 DPA10103-DPB12301 DPA10103-DPB13101 DPA10103-DPB13401 DPA10103-DPB13901 DPA10103-DPB14001 DPA10103-DPB14101 DPA10103-DPB14801 DPA10103-DPB15001 DPA10103-DPB15901 DPA10104-DPB10101 DPA10104-DPB11501 DPA10105-DPB10101 DPA10105-DPB10401 DPA10105-DPB15001 DPA10106-DPB10101 DPA10201-DPB10101 DPA10201-DPB110601 DPA10201-DPB11501 DPA10201-DPB11601 DPA10201-DPB11901 DPA10202-DPB10101 DPA10202-DPB10201 DPA10202-DPB10202 DPA10202-DPB10401 DPA10202-DPB110601 DPA10202-DPB11901 DPA10202-DPB13101 DPA10202-DPB16501 DPA10301-DPB10101 DPA10301-DPB10201 DPA10301-DPB10202 DPA10301-DPB10401 DPA10301-DPB10402 DPA10301-DPB110501 DPA10301-DPB110601 DPA10301-DPB11801 DPA10301-DPB12301 DPA10301-DPB13901 DPA10301-DPB14001 DPA10301-DPB14901 DPA10301-DPB15501 DPA10301-DPB16501 DPA10301-DPB17501 DPA10301-DPB18001 DPA10401-DPB10101 DPA10401-DPB10201; note = HLAs: DPA10401-DPB10202 DPA10401-DPB10402 DPA10401-DPB10501 DPA10401-DPB110501 DPA10401-DPB14901
PPILWSGFELFPDK

SEQ ID NO: 6499 - protein, 20 aa, synthetic construct
  source 1..20: note = Seed: KEPPFLWMGYELHPDKWTVQ; note = HLAs: DRB1_0101 DRB1_1001 DPA10103-DPB10101 DPA10103-DPB10201 DPA10103-DPB10202 DPA10103-DPB10401 DPA10103-DPB10402 DPA10103-DPB10501 DPA10103-DPB110501 DPA10103-DPB112601 DPA10103-DPB11501 DPA10103-DPB11601 DPA10103-DPB11801 DPA10103-DPB11901 DPA10103-DPB12301 DPA10103-DPB13101 DPA10103-DPB13401 DPA10103-DPB13901 DPA10103-DPB14001 DPA10103-DPB14101 DPA10103-DPB14801 DPA10103-DPB14901 DPA10103-DPB15001 DPA10103-DPB15101 DPA10103-DPB15501 DPA10103-DPB15901 DPA10103-DPB18001 DPA10104-DPB10101 DPA10104-DPB11501 DPA10105-DPB10101 DPA10105-DPB10401 DPA10105-DPB11801 DPA10105-DPB15001 DPA10106-DPB10101 DPA10201-DPB10101 DPA10201-DPB10201 DPA10201-DPB10202 DPA10201-DPB10401 DPA10201-DPB10501 DPA10201-DPB110601 DPA10201-DPB11501 DPA10201-DPB11601 DPA10201-DPB11901 DPA10201-DPB13401 DPA10201-DPB15501 DPA10202-DPB10101 DPA10202-DPB10201 DPA10202-DPB10202 DPA10202-DPB10401 DPA10202-DPB10501 DPA10202-DPB110601 DPA10202-DPB11101 DPA10202-DPB11301 DPA10202-DPB11801 DPA10202-DPB11901; note = HLAs: DPA10202-DPB13101 DPA10202-DPB13801 DPA10202-DPB15501 DPA10202-DPB16501 DPA10301-DPB10101 DPA10301-DPB10201 DPA10301-DPB10202 DPA10301-DPB10401 DPA10301-DPB10402 DPA10301-DPB110501 DPA10301-DPB110601 DPA10301-DPB11101 DPA10301-DPB11301 DPA10301-DPB11801 DPA10301-DPB12301 DPA10301-DPB13901 DPA10301-DPB14001 DPA10301-DPB14901 DPA10301-DPB15501 DPA10301-DPB16501 DPA10301-DPB17501 DPA10301-DPB18001 DPA10401-DPB10101 DPA10401-DPB10201 DPA10401-DPB10202 DPA10401-DPB10402 DPA10401-DPB10501 DPA10401-DPB110501 DPA10401-DPB14901
KEPPYLWNGFELVPDKWTVQ

SEQ ID NO: 6500 - protein, 20 aa, synthetic construct
  source 1..20: note = Seed: KEPPFLWMGYELHPDKWTVQ; note = HLAs: DRB1_0101 DPA10103-DPB10101 DPA10103-DPB10201 DPA10103-DPB10202 DPA10103-DPB10401 DPA10103-DPB10402 DPA10103-DPB10501 DPA10103-DPB110501 DPA10103-DPB112601 DPA10103-DPB11501 DPA10103-DPB11601 DPA10103-DPB11801 DPA10103-DPB11901 DPA10103-DPB12301 DPA10103-DPB13101 DPA10103-DPB13401 DPA10103-DPB13901 DPA10103-DPB14001 DPA10103-DPB14101 DPA10103-DPB14801 DPA10103-DPB14901 DPA10103-DPB15001 DPA10103-DPB15101 DPA10103-DPB15501 DPA10103-DPB15901 DPA10103-DPB18001 DPA10104-DPB10101 DPA10104-DPB11501 DPA10105-DPB10101 DPA10105-DPB10401 DPA10105-DPB11801 DPA10105-DPB15001 DPA10106-DPB10101 DPA10201-DPB10101 DPA10201-DPB10201 DPA10201-DPB10202 DPA10201-DPB10401 DPA10201-DPB10501 DPA10201-DPB110601 DPA10201-DPB11501 DPA10201-DPB11601 DPA10201-DPB11901 DPA10201-DPB13401 DPA10201-DPB15501 DPA10202-DPB10101 DPA10202-DPB10201 DPA10202-DPB10202 DPA10202-DPB10401 DPA10202-DPB10501 DPA10202-DPB110601 DPA10202-DPB11101 DPA10202-DPB11301 DPA10202-DPB11801 DPA10202-DPB11901 DPA10202-DPB13101; note = HLAs: DPA10202-DPB13801 DPA10202-DPB15501 DPA10202-DPB16501 DPA10301-DPB10101 DPA10301-DPB10201 DPA10301-DPB10202 DPA10301-DPB10401 DPA10301-DPB10402 DPA10301-DPB110501 DPA10301-DPB110601 DPA10301-DPB11101 DPA10301-DPB11301 DPA10301-DPB11801 DPA10301-DPB12301 DPA10301-DPB13901 DPA10301-DPB14001 DPA10301-DPB14901 DPA10301-DPB15501 DPA10301-DPB16501 DPA10301-DPB17501 DPA10301-DPB18001 DPA10401-DPB10101 DPA10401-DPB10201 DPA10401-DPB10202 DPA10401-DPB10402 DPA10401-DPB10501 DPA10401-DPB110501 DPA10401-DPB14901
KEPPWLWHGFELIPDKWTVQ

SEQ ID NO: 6501 - protein, 14 aa, synthetic construct
  source 1..14: note = Seed: PPFLWMGYELHPDK; note = HLAs: DPA10103-DPB10101 DPA10103-DPB10201 DPA10103-DPB10202 DPA10103-DPB10401 DPA10103-DPB112601 DPA10103-DPB11501 DPA10103-DPB11601 DPA10103-DPB11901 DPA10103-DPB12301 DPA10103-DPB13101 DPA10103-DPB13401 DPA10103-DPB13901 DPA10103-DPB14001 DPA10103-DPB14101 DPA10103-DPB14801 DPA10103-DPB15001 DPA10103-DPB15901 DPA10104-DPB10101 DPA10104-DPB11501 DPA10105-DPB10101 DPA10105-DPB10401 DPA10105-DPB15001 DPA10106-DPB10101 DPA10201-DPB10101 DPA10201-DPB110601 DPA10201-DPB11501 DPA10201-DPB11601 DPA10201-DPB11901 DPA10202-DPB10101 DPA10202-DPB10201 DPA10202-DPB10202 DPA10202-DPB10401 DPA10202-DPB110601 DPA10202-DPB11901 DPA10202-DPB13101 DPA10202-DPB16501 DPA10301-DPB10101 DPA10301-DPB10201 DPA10301-DPB10202 DPA10301-DPB10401 DPA10301-DPB10402 DPA10301-DPB110501 DPA10301-DPB110601 DPA10301-DPB11801 DPA10301-DPB12301 DPA10301-DPB13901 DPA10301-DPB14001 DPA10301-DPB14901 DPA10301-DPB15501 DPA10301-DPB16501 DPA10301-DPB17501 DPA10301-DPB18001 DPA10401-DPB10101 DPA10401-DPB10201; note = HLAs: DPA10401-DPB10202 DPA10401-DPB10402 DPA10401-DPB10501 DPA10401-DPB110501 DPA10401-DPB14901
PPILWHGFELIPDK

SEQ ID NO: 6502 - protein, 20 aa, synthetic construct
  source 1..20: note = Seed: KEPPFLWMGYELHPDKWTVQ; note = HLAs: DPA10103-DPB10101 DPA10103-DPB10201 DPA10103-DPB10202 DPA10103-DPB10401 DPA10103-DPB10402 DPA10103-DPB10501 DPA10103-DPB110501 DPA10103-DPB112601 DPA10103-DPB11501 DPA10103-DPB11601 DPA10103-DPB11801 DPA10103-DPB11901 DPA10103-DPB12301 DPA10103-DPB13101 DPA10103-DPB13401 DPA10103-DPB13901 DPA10103-DPB14001 DPA10103-DPB14101 DPA10103-DPB14801 DPA10103-DPB14901 DPA10103-DPB15001 DPA10103-DPB15101 DPA10103-DPB15501 DPA10103-DPB15901 DPA10103-DPB18001 DPA10104-DPB10101 DPA10104-DPB11501 DPA10105-DPB10101 DPA10105-DPB10401 DPA10105-DPB11801 DPA10105-DPB15001 DPA10106-DPB10101 DPA10201-DPB10101 DPA10201-DPB10201 DPA10201-DPB10202 DPA10201-DPB10401 DPA10201-DPB10501 DPA10201-DPB110601 DPA10201-DPB11501 DPA10201-DPB11601 DPA10201-DPB11901 DPA10201-DPB13401 DPA10201-DPB15501 DPA10202-DPB10101 DPA10202-DPB10201 DPA10202-DPB10202 DPA10202-DPB10401 DPA10202-DPB10501 DPA10202-DPB110601 DPA10202-DPB11101 DPA10202-DPB11301 DPA10202-DPB11801 DPA10202-DPB11901 DPA10202-DPB13101 DPA10202-DPB13801; note = HLAs: DPA10202-DPB15501 DPA10202-DPB16501 DPA10301-DPB10101 DPA10301-DPB10201 DPA10301-DPB10202 DPA10301-DPB10401 DPA10301-DPB10402 DPA10301-DPB110501 DPA10301-DPB110601 DPA10301-DPB11101 DPA10301-DPB11301 DPA10301-DPB11801 DPA10301-DPB12301 DPA10301-DPB13901 DPA10301-DPB14001 DPA10301-DPB14901 DPA10301-DPB15501 DPA10301-DPB16501 DPA10301-DPB17501 DPA10301-DPB18001 DPA10401-DPB10101 DPA10401-DPB10201 DPA10401-DPB10202 DPA10401-DPB10402 DPA10401-DPB10501 DPA10401-DPB110501 DPA10401-DPB14901
KEPPFLWHGYELIPDKWTVQ

SEQ ID NO: 6503 - protein, 14 aa, synthetic construct
  source 1..14: note = Seed: PPFLWMGYELHPDK; note = HLAs: DPA10103-DPB10101 DPA10103-DPB10201 DPA10103-DPB10202 DPA10103-DPB10401 DPA10103-DPB112601 DPA10103-DPB11501 DPA10103-DPB11601 DPA10103-DPB11901 DPA10103-DPB12301 DPA10103-DPB13101 DPA10103-DPB13401 DPA10103-DPB13901 DPA10103-DPB14001 DPA10103-DPB14101 DPA10103-DPB14801 DPA10103-DPB15001 DPA10103-DPB15901 DPA10104-DPB10101 DPA10104-DPB11501 DPA10105-DPB10101 DPA10105-DPB10401 DPA10105-DPB15001 DPA10106-DPB10101 DPA10201-DPB10101 DPA10201-DPB110601 DPA10201-DPB11501 DPA10201-DPB11601 DPA10201-DPB11901 DPA10202-DPB10101 DPA10202-DPB10201 DPA10202-DPB10202 DPA10202-DPB10401 DPA10202-DPB110601 DPA10202-DPB11901 DPA10202-DPB13101 DPA10202-DPB16501 DPA10301-DPB10101 DPA10301-DPB10201 DPA10301-DPB10202 DPA10301-DPB10401 DPA10301-DPB10402 DPA10301-DPB110501 DPA10301-DPB110601 DPA10301-DPB11801 DPA10301-DPB12301 DPA10301-DPB13901 DPA10301-DPB14001 DPA10301-DPB14901 DPA10301-DPB15501 DPA10301-DPB16501 DPA10301-DPB17501 DPA10301-DPB18001 DPA10401-DPB10101 DPA10401-DPB10201; note = HLAs: DPA10401-DPB10202 DPA10401-DPB10402 DPA10401-DPB10501 DPA10401-DPB110501 DPA10401-DPB14901
PPFLWVGWELVPDK

SEQ ID NO: 6504 - protein, 20 aa, synthetic construct
  source 1..20: note = Seed: KEPPFLWMGYELHPDKWTVQ; note = HLAs: DPA10103-DPB10101 DPA10103-DPB10201 DPA10103-DPB10202 DPA10103-DPB10401 DPA10103-DPB10402 DPA10103-DPB10501 DPA10103-DPB110501 DPA10103-DPB112601 DPA10103-DPB11501 DPA10103-DPB11601 DPA10103-DPB11801 DPA10103-DPB11901 DPA10103-DPB12301 DPA10103-DPB13101 DPA10103-DPB13401 DPA10103-DPB13901 DPA10103-DPB14001 DPA10103-DPB14101 DPA10103-DPB14801 DPA10103-DPB14901 DPA10103-DPB15001 DPA10103-DPB15101 DPA10103-DPB15501 DPA10103-DPB15901 DPA10103-DPB18001 DPA10104-DPB10101 DPA10104-DPB11501 DPA10105-DPB10101 DPA10105-DPB10401 DPA10105-DPB11801 DPA10105-DPB15001 DPA10106-DPB10101 DPA10201-DPB10101 DPA10201-DPB10201 DPA10201-DPB10202 DPA10201-DPB10401 DPA10201-DPB10501 DPA10201-DPB110601 DPA10201-DPB11501 DPA10201-DPB11601 DPA10201-DPB11901 DPA10201-DPB13401 DPA10201-DPB15501 DPA10202-DPB10101 DPA10202-DPB10201 DPA10202-DPB10202 DPA10202-DPB10401 DPA10202-DPB10501 DPA10202-DPB110601 DPA10202-DPB11101 DPA10202-DPB11301 DPA10202-DPB11801 DPA10202-DPB11901 DPA10202-DPB13101 DPA10202-DPB13801; note = HLAs: DPA10202-DPB15501 DPA10202-DPB16501 DPA10301-DPB10101 DPA10301-DPB10201 DPA10301-DPB10202 DPA10301-DPB10401 DPA10301-DPB10402 DPA10301-DPB110501 DPA10301-DPB110601 DPA10301-DPB11101 DPA10301-DPB11301 DPA10301-DPB11801 DPA10301-DPB12301 DPA10301-DPB13901 DPA10301-DPB14001 DPA10301-DPB14901 DPA10301-DPB15501 DPA10301-DPB16501 DPA10301-DPB17501 DPA10301-DPB18001 DPA10401-DPB10101 DPA10401-DPB10201 DPA10401-DPB10202 DPA10401-DPB10402 DPA10401-DPB10501 DPA10401-DPB110501 DPA10401-DPB14901
KEPPILWHGFELIPDKWTVQ

SEQ ID NO: 6505 - protein, 20 aa, synthetic construct
  source 1..20: note = Seed: KEPPFLWMGYELHPDKWTVQ; note = HLAs: DRB1_0101 DPA10103-DPB10101 DPA10103-DPB10201 DPA10103-DPB10202 DPA10103-DPB10401 DPA10103-DPB10402 DPA10103-DPB10501 DPA10103-DPB110501 DPA10103-DPB112601 DPA10103-DPB11501 DPA10103-DPB11601 DPA10103-DPB11801 DPA10103-DPB11901 DPA10103-DPB12301 DPA10103-DPB13101 DPA10103-DPB13401 DPA10103-DPB13901 DPA10103-DPB14001 DPA10103-DPB14101 DPA10103-DPB14801 DPA10103-DPB14901 DPA10103-DPB15001 DPA10103-DPB15101 DPA10103-DPB15501 DPA10103-DPB15901 DPA10103-DPB18001 DPA10104-DPB10101 DPA10104-DPB11501 DPA10105-DPB10101 DPA10105-DPB10401 DPA10105-DPB11801 DPA10105-DPB15001 DPA10106-DPB10101 DPA10201-DPB10101 DPA10201-DPB10201 DPA10201-DPB10202 DPA10201-DPB10401 DPA10201-DPB10501 DPA10201-DPB110601 DPA10201-DPB11501 DPA10201-DPB11601 DPA10201-DPB11901 DPA10201-DPB13401 DPA10201-DPB15501 DPA10202-DPB10101 DPA10202-DPB10201 DPA10202-DPB10202 DPA10202-DPB10401 DPA10202-DPB10501 DPA10202-DPB110601 DPA10202-DPB11101 DPA10202-DPB11301 DPA10202-DPB11801 DPA10202-DPB11901 DPA10202-DPB13101; note = HLAs: DPA10202-DPB13801 DPA10202-DPB15501 DPA10202-DPB16501 DPA10301-DPB10101 DPA10301-DPB10201 DPA10301-DPB10202 DPA10301-DPB10401 DPA10301-DPB10402 DPA10301-DPB110501 DPA10301-DPB110601 DPA10301-DPB11301 DPA10301-DPB11801 DPA10301-DPB12301 DPA10301-DPB13901 DPA10301-DPB14001 DPA10301-DPB14901 DPA10301-DPB15501 DPA10301-DPB16501 DPA10301-DPB17501 DPA10301-DPB18001 DPA10401-DPB10101 DPA10401-DPB10201 DPA10401-DPB10202 DPA10401-DPB10402 DPA10401-DPB10501 DPA10401-DPB110501 DPA10401-DPB14901
KEPPFLWHGIELLPDKWTVQ

SEQ ID NO: 6506 - protein, 14 aa, synthetic construct
  source 1..14: note = Seed: PPFLWMGYELHPDK; note = HLAs: DPA10103-DPB10101 DPA10103-DPB10201 DPA10103-DPB10202 DPA10103-DPB10401 DPA10103-DPB112601 DPA10103-DPB11501 DPA10103-DPB11601 DPA10103-DPB11901 DPA10103-DPB12301 DPA10103-DPB13101 DPA10103-DPB13401 DPA10103-DPB13901 DPA10103-DPB14001 DPA10103-DPB14101 DPA10103-DPB14801 DPA10103-DPB15001 DPA10103-DPB15901 DPA10104-DPB10101 DPA10104-DPB11501 DPA10105-DPB10101 DPA10105-DPB10401 DPA10105-DPB15001 DPA10106-DPB10101 DPA10201-DPB10101 DPA10201-DPB110601 DPA10201-DPB11501 DPA10201-DPB11601 DPA10201-DPB11901 DPA10202-DPB10101 DPA10202-DPB10201 DPA10202-DPB10202 DPA10202-DPB10401 DPA10202-DPB110601 DPA10202-DPB11901 DPA10202-DPB13101 DPA10202-DPB16501 DPA10301-DPB10101 DPA10301-DPB10201 DPA10301-DPB10202 DPA10301-DPB10401 DPA10301-DPB10402 DPA10301-DPB110501 DPA10301-DPB110601 DPA10301-DPB11801 DPA10301-DPB12301 DPA10301-DPB13901 DPA10301-DPB14001 DPA10301-DPB14901 DPA10301-DPB15501 DPA10301-DPB16501 DPA10301-DPB17501 DPA10301-DPB18001 DPA10401-DPB10101 DPA10401-DPB10201; note = HLAs: DPA10401-DPB10202 DPA10401-DPB10402 DPA10401-DPB10501 DPA10401-DPB110501 DPA10401-DPB14901
PPLLWAGFELMPDK

SEQ ID NO: 6507 - protein, 14 aa, synthetic construct
  source 1..14: note = Seed: PPFLWMGYELHPDK; note = HLAs: DPA10103-DPB10101 DPA10103-DPB10201 DPA10103-DPB10202 DPA10103-DPB10401 DPA10103-DPB112601 DPA10103-DPB11501 DPA10103-DPB11601 DPA10103-DPB11901 DPA10103-DPB12301 DPA10103-DPB13101 DPA10103-DPB13401 DPA10103-DPB13901 DPA10103-DPB14001 DPA10103-DPB14101 DPA10103-DPB14801 DPA10103-DPB15001 DPA10103-DPB15901 DPA10104-DPB10101 DPA10104-DPB11501 DPA10105-DPB10101 DPA10105-DPB10401 DPA10105-DPB15001 DPA10106-DPB10101 DPA10201-DPB10101 DPA10201-DPB110601 DPA10201-DPB11501 DPA10201-DPB11601 DPA10201-DPB11901 DPA10202-DPB10101 DPA10202-DPB10201 DPA10202-DPB10202 DPA10202-DPB10401 DPA10202-DPB110601 DPA10202-DPB11901 DPA10202-DPB13101 DPA10202-DPB16501 DPA10301-DPB10101 DPA10301-DPB10201 DPA10301-DPB10202 DPA10301-DPB10401 DPA10301-DPB10402 DPA10301-DPB110501 DPA10301-DPB110601 DPA10301-DPB11801 DPA10301-DPB12301 DPA10301-DPB13901 DPA10301-DPB14001 DPA10301-DPB14901 DPA10301-DPB15501 DPA10301-DPB16501 DPA10301-DPB17501 DPA10301-DPB18001 DPA10401-DPB10101 DPA10401-DPB10201; note = HLAs: DPA10401-DPB10202 DPA10401-DPB10402 DPA10401-DPB10501 DPA10401-DPB110501 DPA10401-DPB14901
PPILWHGFELVPDK

SEQ ID NO: 6508 - protein, 14 aa, synthetic construct
  source 1..14: note = Seed: PPFLWMGYELHPDK; note = HLAs: DPA10103-DPB10101 DPA10103-DPB10201 DPA10103-DPB10202 DPA10103-DPB10401 DPA10103-DPB112601 DPA10103-DPB11501 DPA10103-DPB11601 DPA10103-DPB11901 DPA10103-DPB12301 DPA10103-DPB13101 DPA10103-DPB13401 DPA10103-DPB13901 DPA10103-DPB14001 DPA10103-DPB14101 DPA10103-DPB14801 DPA10103-DPB15001 DPA10103-DPB15901 DPA10104-DPB10101 DPA10104-DPB11501 DPA10105-DPB10101 DPA10105-DPB10401 DPA10105-DPB15001 DPA10106-DPB10101 DPA10201-DPB10101 DPA10201-DPB110601 DPA10201-DPB11501 DPA10201-DPB11601 DPA10201-DPB11901 DPA10202-DPB10101 DPA10202-DPB10201 DPA10202-DPB10202 DPA10202-DPB10401 DPA10202-DPB110601 DPA10202-DPB11901 DPA10202-DPB13101 DPA10202-DPB16501 DPA10301-DPB10101 DPA10301-DPB10201 DPA10301-DPB10202 DPA10301-DPB10401 DPA10301-DPB10402 DPA10301-DPB110501 DPA10301-DPB110601 DPA10301-DPB11801 DPA10301-DPB12301 DPA10301-DPB13901 DPA10301-DPB14001 DPA10301-DPB14901 DPA10301-DPB15501 DPA10301-DPB16501 DPA10301-DPB17501 DPA10301-DPB18001 DPA10401-DPB10101 DPA10401-DPB10201; note = HLAs: DPA10401-DPB10202 DPA10401-DPB10402 DPA10401-DPB10501 DPA10401-DPB110501 DPA10401-DPB14901
PPLLWSGFELTPDK

SEQ ID NO: 6509 - protein, 14 aa, synthetic construct
  source 1..14: note = Seed: PPFLWMGYELHPDK; note = HLAs: DPA10103-DPB10101 DPA10103-DPB10201 DPA10103-DPB10202 DPA10103-DPB10401 DPA10103-DPB112601 DPA10103-DPB11501 DPA10103-DPB11601 DPA10103-DPB11901 DPA10103-DPB12301 DPA10103-DPB13101 DPA10103-DPB13401 DPA10103-DPB13901 DPA10103-DPB14001 DPA10103-DPB14101 DPA10103-DPB14801 DPA10103-DPB15001 DPA10103-DPB15901 DPA10104-DPB10101 DPA10104-DPB11501 DPA10105-DPB10101 DPA10105-DPB10401 DPA10105-DPB15001 DPA10106-DPB10101 DPA10201-DPB10101 DPA10201-DPB110601 DPA10201-DPB11501 DPA10201-DPB11601 DPA10201-DPB11901 DPA10202-DPB10101 DPA10202-DPB10201 DPA10202-DPB10202 DPA10202-DPB10401 DPA10202-DPB110601 DPA10202-DPB11901 DPA10202-DPB13101 DPA10202-DPB16501 DPA10301-DPB10101 DPA10301-DPB10201 DPA10301-DPB10202 DPA10301-DPB10401 DPA10301-DPB10402 DPA10301-DPB110501 DPA10301-DPB110601 DPA10301-DPB11801 DPA10301-DPB12301 DPA10301-DPB13901 DPA10301-DPB14001 DPA10301-DPB14901 DPA10301-DPB15501 DPA10301-DPB16501 DPA10301-DPB17501 DPA10301-DPB18001 DPA10401-DPB10101 DPA10401-DPB10201; note = HLAs: DPA10401-DPB10202 DPA10401-DPB10402 DPA10401-DPB10501 DPA10401-DPB110501 DPA10401-DPB14901
PPFLWWGFELIPDK

SEQ ID NO: 6510 - protein, 20 aa, synthetic construct
  source 1..20: note = Seed: KEPPFLWMGYELHPDKWTVQ; note = HLAs: DPA10103-DPB10101 DPA10103-DPB10201 DPA10103-DPB10202 DPA10103-DPB10401 DPA10103-DPB10402 DPA10103-DPB10501 DPA10103-DPB110501 DPA10103-DPB112601 DPA10103-DPB11501 DPA10103-DPB11601 DPA10103-DPB11801 DPA10103-DPB11901 DPA10103-DPB12301 DPA10103-DPB13101 DPA10103-DPB13401 DPA10103-DPB13901 DPA10103-DPB14001 DPA10103-DPB14101 DPA10103-DPB14801 DPA10103-DPB14901 DPA10103-DPB15001 DPA10103-DPB15101 DPA10103-DPB15501 DPA10103-DPB15901 DPA10103-DPB18001 DPA10104-DPB10101 DPA10104-DPB11501 DPA10105-DPB10101 DPA10105-DPB10401 DPA10105-DPB11801 DPA10105-DPB15001 DPA10106-DPB10101 DPA10201-DPB10101 DPA10201-DPB10201 DPA10201-DPB10202 DPA10201-DPB10401 DPA10201-DPB10501 DPA10201-DPB110601 DPA10201-DPB11501 DPA10201-DPB11601 DPA10201-DPB11901 DPA10201-DPB13401 DPA10201-DPB15501 DPA10202-DPB10101 DPA10202-DPB10201 DPA10202-DPB10202 DPA10202-DPB10401 DPA10202-DPB10501 DPA10202-DPB110601 DPA10202-DPB11101 DPA10202-DPB11301 DPA10202-DPB11801 DPA10202-DPB11901 DPA10202-DPB13101 DPA10202-DPB13801; note = HLAs: DPA10202-DPB15501 DPA10202-DPB16501 DPA10301-DPB10101 DPA10301-DPB10201 DPA10301-DPB10202 DPA10301-DPB10401 DPA10301-DPB10402 DPA10301-DPB110501 DPA10301-DPB110601 DPA10301-DPB11101 DPA10301-DPB11301 DPA10301-DPB11801 DPA10301-DPB12301 DPA10301-DPB13901 DPA10301-DPB14001 DPA10301-DPB14901 DPA10301-DPB15501 DPA10301-DPB16501 DPA10301-DPB17501 DPA10301-DPB18001 DPA10401-DPB10101 DPA10401-DPB10201 DPA10401-DPB10202 DPA10401-DPB10402 DPA10401-DPB10501 DPA10401-DPB110501 DPA10401-DPB14901
KEPPFLWHGLELIPDKWTVQ

SEQ ID NO: 6511 - protein, 14 aa, synthetic construct
  source 1..14: note = Seed: PPFLWMGYELHPDK; note = HLAs: DRB1_1001 DPA10103-DPB10101 DPA10103-DPB10201 DPA10103-DPB10202 DPA10103-DPB10401 DPA10103-DPB112601 DPA10103-DPB11501 DPA10103-DPB11601 DPA10103-DPB11901 DPA10103-DPB12301 DPA10103-DPB13101 DPA10103-DPB13401 DPA10103-DPB13901 DPA10103-DPB14001 DPA10103-DPB14101 DPA10103-DPB14801 DPA10103-DPB15001 DPA10103-DPB15901 DPA10104-DPB10101 DPA10104-DPB11501 DPA10105-DPB10101 DPA10105-DPB10401 DPA10105-DPB15001 DPA10106-DPB10101 DPA10201-DPB10101 DPA10201-DPB110601 DPA10201-DPB11501 DPA10201-DPB11601 DPA10201-DPB11901 DPA10202-DPB10101 DPA10202-DPB10201 DPA10202-DPB10202 DPA10202-DPB10401 DPA10202-DPB110601 DPA10202-DPB11901 DPA10202-DPB13101 DPA10202-DPB16501 DPA10301-DPB10101 DPA10301-DPB10201 DPA10301-DPB10202 DPA10301-DPB10401 DPA10301-DPB10402 DPA10301-DPB110501 DPA10301-DPB110601 DPA10301-DPB11801 DPA10301-DPB12301 DPA10301-DPB13901 DPA10301-DPB14001 DPA10301-DPB14901 DPA10301-DPB15501 DPA10301-DPB16501 DPA10301-DPB17501 DPA10301-DPB18001 DPA10401-DPB10101 DPA10401-DPB10201; note = HLAs: DPA10401-DPB10202 DPA10401-DPB10402 DPA10401-DPB10501 DPA10401-DPB110501 DPA10401-DPB14901
PPWLWIGFELLPDK

SEQ ID NO: 6512 - protein, 14 aa, synthetic construct
  source 1..14: note = Seed: PPFLWMGYELHPDK; note = HLAs: DPA10103-DPB10101 DPA10103-DPB10201 DPA10103-DPB10202 DPA10103-DPB10401 DPA10103-DPB112601 DPA10103-DPB11501 DPA10103-DPB11601 DPA10103-DPB11901 DPA10103-DPB12301 DPA10103-DPB13101 DPA10103-DPB13401 DPA10103-DPB13901 DPA10103-DPB14001 DPA10103-DPB14101 DPA10103-DPB14801 DPA10103-DPB15001 DPA10103-DPB15901 DPA10104-DPB10101 DPA10104-DPB11501 DPA10105-DPB10101 DPA10105-DPB10401 DPA10105-DPB15001 DPA10106-DPB10101 DPA10201-DPB10101 DPA10201-DPB110601 DPA10201-DPB11501 DPA10201-DPB11601 DPA10201-DPB11901 DPA10202-DPB10101 DPA10202-DPB10201 DPA10202-DPB10202 DPA10202-DPB10401 DPA10202-DPB110601 DPA10202-DPB11901 DPA10202-DPB13101 DPA10202-DPB16501 DPA10301-DPB10101 DPA10301-DPB10201 DPA10301-DPB10202 DPA10301-DPB10401 DPA10301-DPB10402 DPA10301-DPB110501 DPA10301-DPB110601 DPA10301-DPB11801 DPA10301-DPB12301 DPA10301-DPB13901 DPA10301-DPB14001 DPA10301-DPB14901 DPA10301-DPB15501 DPA10301-DPB16501 DPA10301-DPB17501 DPA10301-DPB18001 DPA10401-DPB10101 DPA10401-DPB10201; note = HLAs: DPA10401-DPB10202 DPA10401-DPB10402 DPA10401-DPB10501 DPA10401-DPB110501 DPA10401-DPB14901
PPFLWTGFELPPDK

SEQ ID NO: 6513 - protein, 14 aa, synthetic construct
  source 1..14: note = Seed: PPFLWMGYELHPDK; note = HLAs: DPA10103-DPB10101 DPA10103-DPB10201 DPA10103-DPB10202 DPA10103-DPB10401 DPA10103-DPB112601 DPA10103-DPB11501 DPA10103-DPB11601 DPA10103-DPB11901 DPA10103-DPB12301 DPA10103-DPB13101 DPA10103-DPB13401 DPA10103-DPB13901 DPA10103-DPB14001 DPA10103-DPB14101 DPA10103-DPB14801 DPA10103-DPB15001 DPA10103-DPB15901 DPA10104-DPB10101 DPA10104-DPB11501 DPA10105-DPB10101 DPA10105-DPB10401 DPA10105-DPB15001 DPA10106-DPB10101 DPA10201-DPB10101 DPA10201-DPB110601 DPA10201-DPB11501 DPA10201-DPB11601 DPA10201-DPB11901 DPA10202-DPB10101 DPA10202-DPB10201 DPA10202-DPB10202 DPA10202-DPB10401 DPA10202-DPB110601 DPA10202-DPB11901 DPA10202-DPB13101 DPA10202-DPB16501 DPA10301-DPB10101 DPA10301-DPB10201 DPA10301-DPB10202 DPA10301-DPB10401 DPA10301-DPB10402 DPA10301-DPB110501 DPA10301-DPB110601 DPA10301-DPB11801 DPA10301-DPB12301 DPA10301-DPB13901 DPA10301-DPB14001 DPA10301-DPB14901 DPA10301-DPB15501 DPA10301-DPB16501 DPA10301-DPB17501 DPA10301-DPB18001 DPA10401-DPB10101 DPA10401-DPB10201; note = HLAs: DPA10401-DPB10202 DPA10401-DPB10402 DPA10401-DPB10501 DPA10401-DPB110501 DPA10401-DPB14901
PPLLWNGFELLPDK

SEQ ID NO: 6514 - protein, 14 aa, synthetic construct
  source 1..14: note = Seed: PPFLWMGYELHPDK; note = HLAs: DPA10103-DPB10101 DPA10103-DPB10201 DPA10103-DPB10202 DPA10103-DPB10401 DPA10103-DPB112601 DPA10103-DPB11501 DPA10103-DPB11601 DPA10103-DPB11901 DPA10103-DPB12301 DPA10103-DPB13101 DPA10103-DPB13401 DPA10103-DPB13901 DPA10103-DPB14001 DPA10103-DPB14101 DPA10103-DPB14801 DPA10103-DPB15001 DPA10103-DPB15901 DPA10104-DPB10101 DPA10104-DPB11501 DPA10105-DPB10101 DPA10105-DPB10401 DPA10105-DPB15001 DPA10106-DPB10101 DPA10201-DPB10101 DPA10201-DPB110601 DPA10201-DPB11501 DPA10201-DPB11601 DPA10201-DPB11901 DPA10202-DPB10101 DPA10202-DPB10201 DPA10202-DPB10202 DPA10202-DPB10401 DPA10202-DPB110601 DPA10202-DPB11901 DPA10202-DPB13101 DPA10202-DPB16501 DPA10301-DPB10101 DPA10301-DPB10201 DPA10301-DPB10202 DPA10301-DPB10401 DPA10301-DPB10402 DPA10301-DPB110501 DPA10301-DPB110601 DPA10301-DPB11801 DPA10301-DPB12301 DPA10301-DPB13901 DPA10301-DPB14001 DPA10301-DPB14901 DPA10301-DPB15501 DPA10301-DPB16501 DPA10301-DPB17501 DPA10301-DPB18001 DPA10401-DPB10101 DPA10401-DPB10201; note = HLAs: DPA10401-DPB10202 DPA10401-DPB10402 DPA10401-DPB10501 DPA10401-DPB110501 DPA10401-DPB14901
PPFLWYGFELVPDK

SEQ ID NO: 6515 - protein, 14 aa, synthetic construct
  source 1..14: note = Seed: PPFLWMGYELHPDK; note = HLAs: DPA10103-DPB10101 DPA10103-DPB10201 DPA10103-DPB10202 DPA10103-DPB10401 DPA10103-DPB112601 DPA10103-DPB11501 DPA10103-DPB11601 DPA10103-DPB11901 DPA10103-DPB12301 DPA10103-DPB13101 DPA10103-DPB13401 DPA10103-DPB13901 DPA10103-DPB14001 DPA10103-DPB14101 DPA10103-DPB14801 DPA10103-DPB15001 DPA10103-DPB15901 DPA10104-DPB10101 DPA10104-DPB11501 DPA10105-DPB10101 DPA10105-DPB10401 DPA10105-DPB15001 DPA10106-DPB10101 DPA10201-DPB10101 DPA10201-DPB110601 DPA10201-DPB11501 DPA10201-DPB11601 DPA10201-DPB11901 DPA10202-DPB10101 DPA10202-DPB10201 DPA10202-DPB10202 DPA10202-DPB10401 DPA10202-DPB110601 DPA10202-DPB11901 DPA10202-DPB13101 DPA10202-DPB16501 DPA10301-DPB10101 DPA10301-DPB10201 DPA10301-DPB10202 DPA10301-DPB10401 DPA10301-DPB10402 DPA10301-DPB110501 DPA10301-DPB110601 DPA10301-DPB11801 DPA10301-DPB12301 DPA10301-DPB13901 DPA10301-DPB14001 DPA10301-DPB14901 DPA10301-DPB16501 DPA10301-DPB17501 DPA10301-DPB18001 DPA10401-DPB10101 DPA10401-DPB10201 DPA10401-DPB10202; note = HLAs: DPA10401-DPB10402 DPA10401-DPB10501 DPA10401-DPB110501 DPA10401-DPB14901
PPFLWRGFELVPDK

SEQ ID NO: 6516 - protein, 14 aa, synthetic construct
  source 1..14: note = Seed: PPFLWMGYELHPDK; note = HLAs: DPA10103-DPB10101 DPA10103-DPB10201 DPA10103-DPB10202 DPA10103-DPB10401 DPA10103-DPB112601 DPA10103-DPB11501 DPA10103-DPB11601 DPA10103-DPB11901 DPA10103-DPB12301 DPA10103-DPB13101 DPA10103-DPB13401 DPA10103-DPB13901 DPA10103-DPB14001 DPA10103-DPB14101 DPA10103-DPB14801 DPA10103-DPB15001 DPA10103-DPB15901 DPA10104-DPB10101 DPA10104-DPB11501 DPA10105-DPB10101 DPA10105-DPB10401 DPA10105-DPB15001 DPA10106-DPB10101 DPA10201-DPB10101 DPA10201-DPB110601 DPA10201-DPB11501 DPA10201-DPB11601 DPA10201-DPB11901 DPA10202-DPB10101 DPA10202-DPB10201 DPA10202-DPB10202 DPA10202-DPB10401 DPA10202-DPB110601 DPA10202-DPB11901 DPA10202-DPB13101 DPA10202-DPB16501 DPA10301-DPB10101 DPA10301-DPB10201 DPA10301-DPB10202 DPA10301-DPB10401 DPA10301-DPB10402 DPA10301-DPB110501 DPA10301-DPB110601 DPA10301-DPB11801 DPA10301-DPB12301 DPA10301-DPB13901 DPA10301-DPB14001 DPA10301-DPB14901 DPA10301-DPB16501 DPA10301-DPB17501 DPA10301-DPB18001 DPA10401-DPB10101 DPA10401-DPB10201 DPA10401-DPB10202; note = HLAs: DPA10401-DPB10402 DPA10401-DPB10501 DPA10401-DPB110501 DPA10401-DPB14901
PPFLWRGFELIPDK

SEQ ID NO: 6517 - protein, 20 aa, synthetic construct
  source 1..20: note = Seed: KEPPFLWMGYELHPDKWTVQ; note = HLAs: DRB1_0101 DPA10103-DPB10101 DPA10103-DPB10201 DPA10103-DPB10202 DPA10103-DPB10401 DPA10103-DPB10402 DPA10103-DPB10501 DPA10103-DPB110501 DPA10103-DPB112601 DPA10103-DPB11501 DPA10103-DPB11601 DPA10103-DPB11801 DPA10103-DPB11901 DPA10103-DPB12301 DPA10103-DPB13101 DPA10103-DPB13401 DPA10103-DPB13901 DPA10103-DPB14001 DPA10103-DPB14101 DPA10103-DPB14801 DPA10103-DPB14901 DPA10103-DPB15001 DPA10103-DPB15101 DPA10103-DPB15501 DPA10103-DPB15901 DPA10103-DPB18001 DPA10104-DPB10101 DPA10104-DPB11501 DPA10105-DPB10101 DPA10105-DPB10401 DPA10105-DPB11801 DPA10105-DPB15001 DPA10106-DPB10101 DPA10201-DPB10101 DPA10201-DPB10201 DPA10201-DPB10202 DPA10201-DPB10401 DPA10201-DPB10501 DPA10201-DPB110601 DPA10201-DPB11501 DPA10201-DPB11601 DPA10201-DPB11901 DPA10201-DPB13401 DPA10201-DPB15501 DPA10202-DPB10101 DPA10202-DPB10201 DPA10202-DPB10202 DPA10202-DPB10401 DPA10202-DPB10501 DPA10202-DPB110601 DPA10202-DPB11101 DPA10202-DPB11301 DPA10202-DPB11801 DPA10202-DPB11901 DPA10202-DPB13101; note = HLAs: DPA10202-DPB13801 DPA10202-DPB15501 DPA10202-DPB16501 DPA10301-DPB10101 DPA10301-DPB10201 DPA10301-DPB10202 DPA10301-DPB10401 DPA10301-DPB10402 DPA10301-DPB110501 DPA10301-DPB110601 DPA10301-DPB11101 DPA10301-DPB11301 DPA10301-DPB11801 DPA10301-DPB12301 DPA10301-DPB13901 DPA10301-DPB14001 DPA10301-DPB14901 DPA10301-DPB15501 DPA10301-DPB16501 DPA10301-DPB17501 DPA10301-DPB18001 DPA10401-DPB10101 DPA10401-DPB10201 DPA10401-DPB10202 DPA10401-DPB10402 DPA10401-DPB10501 DPA10401-DPB110501 DPA10401-DPB14901
KEPPILWHGFELVPDKWTVQ

SEQ ID NO: 6518 - protein, 20 aa, synthetic construct
  source 1..20: note = Seed: KEPPFLWMGYELHPDKWTVQ; note = HLAs: DRB1_0101 DPA10103-DPB10101 DPA10103-DPB10201 DPA10103-DPB10202 DPA10103-DPB10401 DPA10103-DPB10402 DPA10103-DPB10501 DPA10103-DPB110501 DPA10103-DPB112601 DPA10103-DPB11501 DPA10103-DPB11601 DPA10103-DPB11801 DPA10103-DPB11901 DPA10103-DPB12301 DPA10103-DPB13101 DPA10103-DPB13401 DPA10103-DPB13901 DPA10103-DPB14001 DPA10103-DPB14101 DPA10103-DPB14801 DPA10103-DPB14901 DPA10103-DPB15001 DPA10103-DPB15101 DPA10103-DPB15501 DPA10103-DPB15901 DPA10103-DPB18001 DPA10104-DPB10101 DPA10104-DPB11501 DPA10105-DPB10101 DPA10105-DPB10401 DPA10105-DPB11801 DPA10105-DPB15001 DPA10106-DPB10101 DPA10201-DPB10101 DPA10201-DPB10201 DPA10201-DPB10202 DPA10201-DPB10401 DPA10201-DPB10501 DPA10201-DPB110601 DPA10201-DPB11501 DPA10201-DPB11601 DPA10201-DPB11901 DPA10201-DPB13401 DPA10201-DPB15501 DPA10202-DPB10101 DPA10202-DPB10201 DPA10202-DPB10202 DPA10202-DPB10401 DPA10202-DPB10501 DPA10202-DPB110601 DPA10202-DPB11101 DPA10202-DPB11301 DPA10202-DPB11801 DPA10202-DPB11901 DPA10202-DPB13101; note = HLAs: DPA10202-DPB13801 DPA10202-DPB15501 DPA10202-DPB16501 DPA10301-DPB10101 DPA10301-DPB10201 DPA10301-DPB10202 DPA10301-DPB10401 DPA10301-DPB10402 DPA10301-DPB110501 DPA10301-DPB110601 DPA10301-DPB11101 DPA10301-DPB11301 DPA10301-DPB11801 DPA10301-DPB12301 DPA10301-DPB13901 DPA10301-DPB14001 DPA10301-DPB14901 DPA10301-DPB15501 DPA10301-DPB16501 DPA10301-DPB17501 DPA10301-DPB18001 DPA10401-DPB10101 DPA10401-DPB10201 DPA10401-DPB10202 DPA10401-DPB10402 DPA10401-DPB10501 DPA10401-DPB110501 DPA10401-DPB14901
KEPPFLWTGWELMPDKWTVQ

SEQ ID NO: 6519 - protein, 14 aa, synthetic construct
  source 1..14: note = Seed: PPFLWMGYELHPDK; note = HLAs: DRB1_1001 DPA10103-DPB10101 DPA10103-DPB10201 DPA10103-DPB10202 DPA10103-DPB10401 DPA10103-DPB112601 DPA10103-DPB11501 DPA10103-DPB11601 DPA10103-DPB11901 DPA10103-DPB12301 DPA10103-DPB13101 DPA10103-DPB13401 DPA10103-DPB13901 DPA10103-DPB14001 DPA10103-DPB14101 DPA10103-DPB14801 DPA10103-DPB15001 DPA10103-DPB15901 DPA10104-DPB10101 DPA10104-DPB11501 DPA10105-DPB10101 DPA10105-DPB10401 DPA10105-DPB15001 DPA10106-DPB10101 DPA10201-DPB10101 DPA10201-DPB110601 DPA10201-DPB11501 DPA10201-DPB11601 DPA10201-DPB11901 DPA10202-DPB10101 DPA10202-DPB10201 DPA10202-DPB10202 DPA10202-DPB10401 DPA10202-DPB110601 DPA10202-DPB11901 DPA10202-DPB13101 DPA10202-DPB16501 DPA10301-DPB10101 DPA10301-DPB10201 DPA10301-DPB10202 DPA10301-DPB10401 DPA10301-DPB10402 DPA10301-DPB110501 DPA10301-DPB110601 DPA10301-DPB11801 DPA10301-DPB12301 DPA10301-DPB13901 DPA10301-DPB14001 DPA10301-DPB14901 DPA10301-DPB15501 DPA10301-DPB16501 DPA10301-DPB17501 DPA10301-DPB18001 DPA10401-DPB10101 DPA10401-DPB10201; note = HLAs: DPA10401-DPB10202 DPA10401-DPB10402 DPA10401-DPB10501 DPA10401-DPB110501 DPA10401-DPB14901
PPYLWIGFELMPDK

SEQ ID NO: 6520 - protein, 20 aa, synthetic construct
  source 1..20: note = Seed: KEPPFLWMGYELHPDKWTVQ; note = HLAs: DRB1_0101 DRB1_1001 DPA10103-DPB10101 DPA10103-DPB10201 DPA10103-DPB10202 DPA10103-DPB10401 DPA10103-DPB10402 DPA10103-DPB10501 DPA10103-DPB110501 DPA10103-DPB112601 DPA10103-DPB11501 DPA10103-DPB11601 DPA10103-DPB11801 DPA10103-DPB11901 DPA10103-DPB12301 DPA10103-DPB13101 DPA10103-DPB13401 DPA10103-DPB13901 DPA10103-DPB14001 DPA10103-DPB14101 DPA10103-DPB14801 DPA10103-DPB14901 DPA10103-DPB15001 DPA10103-DPB15101 DPA10103-DPB15501 DPA10103-DPB15901 DPA10103-DPB18001 DPA10104-DPB10101 DPA10104-DPB11501 DPA10105-DPB10101 DPA10105-DPB10401 DPA10105-DPB11801 DPA10105-DPB15001 DPA10106-DPB10101 DPA10201-DPB10101 DPA10201-DPB10201 DPA10201-DPB10202 DPA10201-DPB10401 DPA10201-DPB10501 DPA10201-DPB110601 DPA10201-DPB11501 DPA10201-DPB11601 DPA10201-DPB11901 DPA10201-DPB13401 DPA10201-DPB15501 DPA10202-DPB10101 DPA10202-DPB10201 DPA10202-DPB10202 DPA10202-DPB10401 DPA10202-DPB10501 DPA10202-DPB110601 DPA10202-DPB11101 DPA10202-DPB11301 DPA10202-DPB11801 DPA10202-DPB11901; note = HLAs: DPA10202-DPB13101 DPA10202-DPB13801 DPA10202-DPB15501 DPA10202-DPB16501 DPA10301-DPB10101 DPA10301-DPB10201 DPA10301-DPB10202 DPA10301-DPB10401 DPA10301-DPB10402 DPA10301-DPB110501 DPA10301-DPB110601 DPA10301-DPB11101 DPA10301-DPB11301 DPA10301-DPB11801 DPA10301-DPB12301 DPA10301-DPB13901 DPA10301-DPB14001 DPA10301-DPB14901 DPA10301-DPB15501 DPA10301-DPB16501 DPA10301-DPB17501 DPA10301-DPB18001 DPA10401-DPB10101 DPA10401-DPB10201 DPA10401-DPB10202 DPA10401-DPB10402 DPA10401-DPB10501 DPA10401-DPB110501 DPA10401-DPB14901
KEPPFLWQGFELTPDKWTVQ

SEQ ID NO: 6521 - protein, 14 aa, synthetic construct
  source 1..14: note = Seed: PPFLWMGYELHPDK; note = HLAs: DRB1_1001 DPA10103-DPB10101 DPA10103-DPB10201 DPA10103-DPB10202 DPA10103-DPB10401 DPA10103-DPB112601 DPA10103-DPB11501 DPA10103-DPB11601 DPA10103-DPB11901 DPA10103-DPB12301 DPA10103-DPB13101 DPA10103-DPB13401 DPA10103-DPB13901 DPA10103-DPB14001 DPA10103-DPB14101 DPA10103-DPB14801 DPA10103-DPB15001 DPA10103-DPB15901 DPA10104-DPB10101 DPA10104-DPB11501 DPA10105-DPB10101 DPA10105-DPB10401 DPA10105-DPB15001 DPA10106-DPB10101 DPA10201-DPB10101 DPA10201-DPB110601 DPA10201-DPB11501 DPA10201-DPB11601 DPA10201-DPB11901 DPA10202-DPB10101 DPA10202-DPB10201 DPA10202-DPB10202 DPA10202-DPB10401 DPA10202-DPB110601 DPA10202-DPB11901 DPA10202-DPB13101 DPA10202-DPB16501 DPA10301-DPB10101 DPA10301-DPB10201 DPA10301-DPB10202 DPA10301-DPB10401 DPA10301-DPB10402 DPA10301-DPB110501 DPA10301-DPB110601 DPA10301-DPB11801 DPA10301-DPB12301 DPA10301-DPB13901 DPA10301-DPB14001 DPA10301-DPB14901 DPA10301-DPB15501 DPA10301-DPB16501 DPA10301-DPB17501 DPA10301-DPB18001 DPA10401-DPB10101 DPA10401-DPB10201; note = HLAs: DPA10401-DPB10202 DPA10401-DPB10402 DPA10401-DPB10501 DPA10401-DPB110501 DPA10401-DPB14901
PPYLWVGFELMPDK

SEQ ID NO: 6522 - protein, 20 aa, synthetic construct
  source 1..20: note = Seed: KEPPFLWMGYELHPDKWTVQ; note = HLAs: DPA10103-DPB10101 DPA10103-DPB10201 DPA10103-DPB10202 DPA10103-DPB10401 DPA10103-DPB10402 DPA10103-DPB10501 DPA10103-DPB110501 DPA10103-DPB112601 DPA10103-DPB11501 DPA10103-DPB11601 DPA10103-DPB11801 DPA10103-DPB11901 DPA10103-DPB12301 DPA10103-DPB13101 DPA10103-DPB13401 DPA10103-DPB13901 DPA10103-DPB14001 DPA10103-DPB14101 DPA10103-DPB14801 DPA10103-DPB14901 DPA10103-DPB15001 DPA10103-DPB15101 DPA10103-DPB15501 DPA10103-DPB15901 DPA10103-DPB18001 DPA10104-DPB10101 DPA10104-DPB11501 DPA10105-DPB10101 DPA10105-DPB10401 DPA10105-DPB11801 DPA10105-DPB15001 DPA10106-DPB10101 DPA10201-DPB10101 DPA10201-DPB10201 DPA10201-DPB10202 DPA10201-DPB10401 DPA10201-DPB10501 DPA10201-DPB110601 DPA10201-DPB11501 DPA10201-DPB11601 DPA10201-DPB11901 DPA10201-DPB13401 DPA10201-DPB15501 DPA10202-DPB10101 DPA10202-DPB10201 DPA10202-DPB10202 DPA10202-DPB10401 DPA10202-DPB10501 DPA10202-DPB110601 DPA10202-DPB11101 DPA10202-DPB11301 DPA10202-DPB11801 DPA10202-DPB11901 DPA10202-DPB13101 DPA10202-DPB13801; note = HLAs: DPA10202-DPB15501 DPA10202-DPB16501 DPA10301-DPB10101 DPA10301-DPB10201 DPA10301-DPB10202 DPA10301-DPB10401 DPA10301-DPB10402 DPA10301-DPB110501 DPA10301-DPB110601 DPA10301-DPB11101 DPA10301-DPB11301 DPA10301-DPB11801 DPA10301-DPB12301 DPA10301-DPB13901 DPA10301-DPB14001 DPA10301-DPB14901 DPA10301-DPB15501 DPA10301-DPB16501 DPA10301-DPB17501 DPA10301-DPB18001 DPA10401-DPB10101 DPA10401-DPB10201 DPA10401-DPB10202 DPA10401-DPB10402 DPA10401-DPB10501 DPA10401-DPB110501 DPA10401-DPB14901
KEPPVLWSGFELLPDKWTVQ

SEQ ID NO: 6523 - protein, 20 aa, synthetic construct
  source 1..20: note = Seed: KEPPFLWMGYELHPDKWTVQ; note = HLAs: DRB1_0101 DPA10103-DPB10101 DPA10103-DPB10201 DPA10103-DPB10202 DPA10103-DPB10401 DPA10103-DPB10402 DPA10103-DPB10501 DPA10103-DPB110501 DPA10103-DPB112601 DPA10103-DPB11501 DPA10103-DPB11601 DPA10103-DPB11801 DPA10103-DPB11901 DPA10103-DPB12301 DPA10103-DPB13101 DPA10103-DPB13401 DPA10103-DPB13901 DPA10103-DPB14001 DPA10103-DPB14101 DPA10103-DPB14801 DPA10103-DPB14901 DPA10103-DPB15001 DPA10103-DPB15101 DPA10103-DPB15501 DPA10103-DPB15901 DPA10103-DPB18001 DPA10104-DPB10101 DPA10104-DPB11501 DPA10105-DPB10101 DPA10105-DPB10401 DPA10105-DPB11801 DPA10105-DPB15001 DPA10106-DPB10101 DPA10201-DPB10101 DPA10201-DPB10201 DPA10201-DPB10202 DPA10201-DPB10401 DPA10201-DPB10501 DPA10201-DPB110601 DPA10201-DPB11501 DPA10201-DPB11601 DPA10201-DPB11901 DPA10201-DPB13401 DPA10201-DPB15501 DPA10202-DPB10101 DPA10202-DPB10201 DPA10202-DPB10202 DPA10202-DPB10401 DPA10202-DPB10501 DPA10202-DPB110601 DPA10202-DPB11101 DPA10202-DPB11301 DPA10202-DPB11801 DPA10202-DPB11901 DPA10202-DPB13101; note = HLAs: DPA10202-DPB13801 DPA10202-DPB15501 DPA10202-DPB16501 DPA10301-DPB10101 DPA10301-DPB10201 DPA10301-DPB10202 DPA10301-DPB10401 DPA10301-DPB10402 DPA10301-DPB110501 DPA10301-DPB110601 DPA10301-DPB11101 DPA10301-DPB11301 DPA10301-DPB11801 DPA10301-DPB12301 DPA10301-DPB13901 DPA10301-DPB14001 DPA10301-DPB14901 DPA10301-DPB15501 DPA10301-DPB16501 DPA10301-DPB17501 DPA10301-DPB18001 DPA10401-DPB10101 DPA10401-DPB10201 DPA10401-DPB10202 DPA10401-DPB10402 DPA10401-DPB10501 DPA10401-DPB110501 DPA10401-DPB14901
KEPPFLWAGFELHPDKWTVQ

SEQ ID NO: 6524 - protein, 20 aa, synthetic construct
  source 1..20: note = Seed: KEPPFLWMGYELHPDKWTVQ; note = HLAs: DRB1_0101 DPA10103-DPB10101 DPA10103-DPB10201 DPA10103-DPB10202 DPA10103-DPB10401 DPA10103-DPB10402 DPA10103-DPB10501 DPA10103-DPB110501 DPA10103-DPB112601 DPA10103-DPB11501 DPA10103-DPB11601 DPA10103-DPB11801 DPA10103-DPB11901 DPA10103-DPB12301 DPA10103-DPB13101 DPA10103-DPB13401 DPA10103-DPB13901 DPA10103-DPB14001 DPA10103-DPB14101 DPA10103-DPB14801 DPA10103-DPB14901 DPA10103-DPB15001 DPA10103-DPB15101 DPA10103-DPB15501 DPA10103-DPB15901 DPA10103-DPB18001 DPA10104-DPB10101 DPA10104-DPB11501 DPA10105-DPB10101 DPA10105-DPB10401 DPA10105-DPB11801 DPA10105-DPB15001 DPA10106-DPB10101 DPA10201-DPB10101 DPA10201-DPB10201 DPA10201-DPB10202 DPA10201-DPB10401 DPA10201-DPB10501 DPA10201-DPB110601 DPA10201-DPB11501 DPA10201-DPB11601 DPA10201-DPB11901 DPA10201-DPB13401 DPA10201-DPB15501 DPA10202-DPB10101 DPA10202-DPB10201 DPA10202-DPB10202 DPA10202-DPB10401 DPA10202-DPB10501 DPA10202-DPB110601 DPA10202-DPB11101 DPA10202-DPB11301 DPA10202-DPB11801 DPA10202-DPB11901 DPA10202-DPB13101; note = HLAs: DPA10202-DPB13801 DPA10202-DPB15501 DPA10202-DPB16501 DPA10301-DPB10101 DPA10301-DPB10201 DPA10301-DPB10202 DPA10301-DPB10401 DPA10301-DPB10402 DPA10301-DPB110501 DPA10301-DPB110601 DPA10301-DPB11101 DPA10301-DPB11301 DPA10301-DPB11801 DPA10301-DPB12301 DPA10301-DPB13901 DPA10301-DPB14001 DPA10301-DPB14901 DPA10301-DPB15501 DPA10301-DPB16501 DPA10301-DPB17501 DPA10301-DPB18001 DPA10401-DPB10101 DPA10401-DPB10201 DPA10401-DPB10202 DPA10401-DPB10402 DPA10401-DPB10501 DPA10401-DPB110501 DPA10401-DPB14901
KEPPWLWEGFELVPDKWTVQ

SEQ ID NO: 6525 - protein, 14 aa, synthetic construct
  source 1..14: note = Seed: PPFLWMGYELHPDK; note = HLAs: DRB1_1001 DPA10103-DPB10101 DPA10103-DPB10201 DPA10103-DPB10202 DPA10103-DPB10401 DPA10103-DPB112601 DPA10103-DPB11501 DPA10103-DPB11601 DPA10103-DPB11901 DPA10103-DPB12301 DPA10103-DPB13101 DPA10103-DPB13401 DPA10103-DPB13901 DPA10103-DPB14001 DPA10103-DPB14101 DPA10103-DPB14801 DPA10103-DPB15001 DPA10103-DPB15901 DPA10104-DPB10101 DPA10104-DPB11501 DPA10105-DPB10101 DPA10105-DPB10401 DPA10105-DPB15001 DPA10106-DPB10101 DPA10201-DPB10101 DPA10201-DPB110601 DPA10201-DPB11501 DPA10201-DPB11601 DPA10201-DPB11901 DPA10202-DPB10101 DPA10202-DPB10201 DPA10202-DPB10202 DPA10202-DPB10401 DPA10202-DPB110601 DPA10202-DPB11901 DPA10202-DPB13101 DPA10202-DPB16501 DPA10301-DPB10101 DPA10301-DPB10201 DPA10301-DPB10202 DPA10301-DPB10401 DPA10301-DPB10402 DPA10301-DPB110501 DPA10301-DPB110601 DPA10301-DPB11801 DPA10301-DPB12301 DPA10301-DPB13901 DPA10301-DPB14001 DPA10301-DPB14901 DPA10301-DPB15501 DPA10301-DPB16501 DPA10301-DPB17501 DPA10301-DPB18001 DPA10401-DPB10101 DPA10401-DPB10201; note = HLAs: DPA10401-DPB10202 DPA10401-DPB10402 DPA10401-DPB10501 DPA10401-DPB110501 DPA10401-DPB14901
PPFLWQGFELTPDK

SEQ ID NO: 6526 - protein, 20 aa, synthetic construct
  source 1..20: note = Seed: KEPPFLWMGYELHPDKWTVQ; note = HLAs: DRB1_1001 DPA10103-DPB10101 DPA10103-DPB10201 DPA10103-DPB10202 DPA10103-DPB10401 DPA10103-DPB10402 DPA10103-DPB10501 DPA10103-DPB110501 DPA10103-DPB112601 DPA10103-DPB11501 DPA10103-DPB11601 DPA10103-DPB11801 DPA10103-DPB11901 DPA10103-DPB12301 DPA10103-DPB13101 DPA10103-DPB13401 DPA10103-DPB13901 DPA10103-DPB14001 DPA10103-DPB14101 DPA10103-DPB14801 DPA10103-DPB14901 DPA10103-DPB15001 DPA10103-DPB15101 DPA10103-DPB15501 DPA10103-DPB15901 DPA10103-DPB18001 DPA10104-DPB10101 DPA10104-DPB11501 DPA10105-DPB10101 DPA10105-DPB10401 DPA10105-DPB11801 DPA10105-DPB15001 DPA10106-DPB10101 DPA10201-DPB10101 DPA10201-DPB10201 DPA10201-DPB10202 DPA10201-DPB10401 DPA10201-DPB10501 DPA10201-DPB110601 DPA10201-DPB11501 DPA10201-DPB11601 DPA10201-DPB11901 DPA10201-DPB13401 DPA10201-DPB15501 DPA10202-DPB10101 DPA10202-DPB10201 DPA10202-DPB10202 DPA10202-DPB10401 DPA10202-DPB10501 DPA10202-DPB110601 DPA10202-DPB11101 DPA10202-DPB11301 DPA10202-DPB11801 DPA10202-DPB11901 DPA10202-DPB13101; note = HLAs: DPA10202-DPB13801 DPA10202-DPB15501 DPA10202-DPB16501 DPA10301-DPB10101 DPA10301-DPB10201 DPA10301-DPB10202 DPA10301-DPB10401 DPA10301-DPB10402 DPA10301-DPB110501 DPA10301-DPB110601 DPA10301-DPB11101 DPA10301-DPB11301 DPA10301-DPB11801 DPA10301-DPB12301 DPA10301-DPB13901 DPA10301-DPB14001 DPA10301-DPB14901 DPA10301-DPB15501 DPA10301-DPB16501 DPA10301-DPB17501 DPA10301-DPB18001 DPA10401-DPB10101 DPA10401-DPB10201 DPA10401-DPB10202 DPA10401-DPB10402 DPA10401-DPB10501 DPA10401-DPB110501 DPA10401-DPB14901
KEPPFLWIGFELEPDKWTVQ

SEQ ID NO: 6527 - protein, 14 aa, synthetic construct
  source 1..14: note = Seed: PPFLWMGYELHPDK; note = HLAs: DRB1_1001 DPA10103-DPB10101 DPA10103-DPB10201 DPA10103-DPB10202 DPA10103-DPB10401 DPA10103-DPB112601 DPA10103-DPB11501 DPA10103-DPB11601 DPA10103-DPB11901 DPA10103-DPB12301 DPA10103-DPB13101 DPA10103-DPB13401 DPA10103-DPB13901 DPA10103-DPB14001 DPA10103-DPB14101 DPA10103-DPB14801 DPA10103-DPB15001 DPA10103-DPB15901 DPA10104-DPB10101 DPA10104-DPB11501 DPA10105-DPB10101 DPA10105-DPB10401 DPA10105-DPB15001 DPA10106-DPB10101 DPA10201-DPB10101 DPA10201-DPB110601 DPA10201-DPB11501 DPA10201-DPB11601 DPA10201-DPB11901 DPA10202-DPB10101 DPA10202-DPB10201 DPA10202-DPB10202 DPA10202-DPB10401 DPA10202-DPB110601 DPA10202-DPB11901 DPA10202-DPB13101 DPA10202-DPB16501 DPA10301-DPB10101 DPA10301-DPB10201 DPA10301-DPB10202 DPA10301-DPB10401 DPA10301-DPB10402 DPA10301-DPB110501 DPA10301-DPB110601 DPA10301-DPB11801 DPA10301-DPB12301 DPA10301-DPB13901 DPA10301-DPB14001 DPA10301-DPB14901 DPA10301-DPB15501 DPA10301-DPB16501 DPA10301-DPB17501 DPA10301-DPB18001 DPA10401-DPB10101 DPA10401-DPB10201; note = HLAs: DPA10401-DPB10202 DPA10401-DPB10402 DPA10401-DPB10501 DPA10401-DPB110501 DPA10401-DPB14901
PPFLWIGWELVPDK

SEQ ID NO: 6528 - protein, 14 aa, synthetic construct
  source 1..14: note = Seed: PPFLWMGYELHPDK; note = HLAs: DPA10103-DPB10101 DPA10103-DPB10201 DPA10103-DPB10202 DPA10103-DPB10401 DPA10103-DPB112601 DPA10103-DPB11501 DPA10103-DPB11601 DPA10103-DPB11901 DPA10103-DPB12301 DPA10103-DPB13101 DPA10103-DPB13401 DPA10103-DPB13901 DPA10103-DPB14001 DPA10103-DPB14101 DPA10103-DPB14801 DPA10103-DPB15001 DPA10103-DPB15901 DPA10104-DPB10101 DPA10104-DPB11501 DPA10105-DPB10101 DPA10105-DPB10401 DPA10105-DPB15001 DPA10106-DPB10101 DPA10201-DPB10101 DPA10201-DPB110601 DPA10201-DPB11501 DPA10201-DPB11601 DPA10201-DPB11901 DPA10202-DPB10101 DPA10202-DPB10201 DPA10202-DPB10202 DPA10202-DPB10401 DPA10202-DPB110601 DPA10202-DPB11901 DPA10202-DPB13101 DPA10202-DPB16501 DPA10301-DPB10101 DPA10301-DPB10201 DPA10301-DPB10202 DPA10301-DPB10401 DPA10301-DPB10402 DPA10301-DPB110501 DPA10301-DPB110601 DPA10301-DPB11801 DPA10301-DPB12301 DPA10301-DPB13901 DPA10301-DPB14001 DPA10301-DPB14901 DPA10301-DPB15501 DPA10301-DPB16501 DPA10301-DPB17501 DPA10301-DPB18001 DPA10401-DPB10101 DPA10401-DPB10201; note = HLAs: DPA10401-DPB10202 DPA10401-DPB10402 DPA10401-DPB10501 DPA10401-DPB110501 DPA10401-DPB14901
PPFLWQGFELYPDK

SEQ ID NO: 6529 - protein, 20 aa, synthetic construct
  source 1..20: note = Seed: KEPPFLWMGYELHPDKWTVQ; note = HLAs: DRB1_0101 DPA10103-DPB10101 DPA10103-DPB10201 DPA10103-DPB10202 DPA10103-DPB10401 DPA10103-DPB10402 DPA10103-DPB10501 DPA10103-DPB110501 DPA10103-DPB112601 DPA10103-DPB11501 DPA10103-DPB11601 DPA10103-DPB11801 DPA10103-DPB11901 DPA10103-DPB12301 DPA10103-DPB13101 DPA10103-DPB13401 DPA10103-DPB13901 DPA10103-DPB14001 DPA10103-DPB14101 DPA10103-DPB14801 DPA10103-DPB14901 DPA10103-DPB15001 DPA10103-DPB15101 DPA10103-DPB15501 DPA10103-DPB15901 DPA10103-DPB18001 DPA10104-DPB10101 DPA10104-DPB11501 DPA10105-DPB10101 DPA10105-DPB10401 DPA10105-DPB11801 DPA10105-DPB15001 DPA10106-DPB10101 DPA10201-DPB10101 DPA10201-DPB10201 DPA10201-DPB10202 DPA10201-DPB10401 DPA10201-DPB10501 DPA10201-DPB110601 DPA10201-DPB11501 DPA10201-DPB11601 DPA10201-DPB11901 DPA10201-DPB13401 DPA10201-DPB15501 DPA10202-DPB10101 DPA10202-DPB10201 DPA10202-DPB10202 DPA10202-DPB10401 DPA10202-DPB10501 DPA10202-DPB110601 DPA10202-DPB11101 DPA10202-DPB11301 DPA10202-DPB11801 DPA10202-DPB11901 DPA10202-DPB13101; note = HLAs: DPA10202-DPB13801 DPA10202-DPB15501 DPA10202-DPB16501 DPA10301-DPB10101 DPA10301-DPB10201 DPA10301-DPB10202 DPA10301-DPB10401 DPA10301-DPB10402 DPA10301-DPB110501 DPA10301-DPB110601 DPA10301-DPB11101 DPA10301-DPB11301 DPA10301-DPB11801 DPA10301-DPB12301 DPA10301-DPB13901 DPA10301-DPB14001 DPA10301-DPB14901 DPA10301-DPB15501 DPA10301-DPB16501 DPA10301-DPB17501 DPA10301-DPB18001 DPA10401-DPB10101 DPA10401-DPB10201 DPA10401-DPB10202 DPA10401-DPB10402 DPA10401-DPB10501 DPA10401-DPB110501 DPA10401-DPB14901
KEPPFLWHGWELLPDKWTVQ

SEQ ID NO: 6530 - protein, 20 aa, synthetic construct
  source 1..20: note = Seed: KEPPFLWMGYELHPDKWTVQ; note = HLAs: DPA10103-DPB10101 DPA10103-DPB10201 DPA10103-DPB10202 DPA10103-DPB10401 DPA10103-DPB10402 DPA10103-DPB10501 DPA10103-DPB110501 DPA10103-DPB112601 DPA10103-DPB11501 DPA10103-DPB11601 DPA10103-DPB11801 DPA10103-DPB11901 DPA10103-DPB12301 DPA10103-DPB13101 DPA10103-DPB13401 DPA10103-DPB13901 DPA10103-DPB14001 DPA10103-DPB14101 DPA10103-DPB14801 DPA10103-DPB14901 DPA10103-DPB15001 DPA10103-DPB15101 DPA10103-DPB15501 DPA10103-DPB15901 DPA10103-DPB18001 DPA10104-DPB10101 DPA10104-DPB11501 DPA10105-DPB10101 DPA10105-DPB10401 DPA10105-DPB11801 DPA10105-DPB15001 DPA10106-DPB10101 DPA10201-DPB10101 DPA10201-DPB10201 DPA10201-DPB10202 DPA10201-DPB10401 DPA10201-DPB10501 DPA10201-DPB110601 DPA10201-DPB11501 DPA10201-DPB11601 DPA10201-DPB11901 DPA10201-DPB13401 DPA10201-DPB15501 DPA10202-DPB10101 DPA10202-DPB10201 DPA10202-DPB10202 DPA10202-DPB10401 DPA10202-DPB10501 DPA10202-DPB110601 DPA10202-DPB11101 DPA10202-DPB11301 DPA10202-DPB11801 DPA10202-DPB11901 DPA10202-DPB13101 DPA10202-DPB13801; note = HLAs: DPA10202-DPB15501 DPA10202-DPB16501 DPA10301-DPB10101 DPA10301-DPB10201 DPA10301-DPB10202 DPA10301-DPB10401 DPA10301-DPB10402 DPA10301-DPB110501 DPA10301-DPB110601 DPA10301-DPB11101 DPA10301-DPB11301 DPA10301-DPB11801 DPA10301-DPB12301 DPA10301-DPB13901 DPA10301-DPB14001 DPA10301-DPB14901 DPA10301-DPB15501 DPA10301-DPB16501 DPA10301-DPB17501 DPA10301-DPB18001 DPA10401-DPB10101 DPA10401-DPB10201 DPA10401-DPB10202 DPA10401-DPB10402 DPA10401-DPB10501 DPA10401-DPB110501 DPA10401-DPB14901
KEPPILWEGFELLPDKWTVQ

SEQ ID NO: 6531 - protein, 14 aa, synthetic construct
  source 1..14: note = Seed: PPFLWMGYELHPDK; note = HLAs: DPA10103-DPB10101 DPA10103-DPB10201 DPA10103-DPB10202 DPA10103-DPB10401 DPA10103-DPB112601 DPA10103-DPB11501 DPA10103-DPB11601 DPA10103-DPB11901 DPA10103-DPB12301 DPA10103-DPB13101 DPA10103-DPB13401 DPA10103-DPB13901 DPA10103-DPB14001 DPA10103-DPB14101 DPA10103-DPB14801 DPA10103-DPB15001 DPA10103-DPB15901 DPA10104-DPB10101 DPA10104-DPB11501 DPA10105-DPB10101 DPA10105-DPB10401 DPA10105-DPB15001 DPA10106-DPB10101 DPA10201-DPB10101 DPA10201-DPB110601 DPA10201-DPB11501 DPA10201-DPB11601 DPA10201-DPB11901 DPA10202-DPB10101 DPA10202-DPB10201 DPA10202-DPB10202 DPA10202-DPB10401 DPA10202-DPB110601 DPA10202-DPB11901 DPA10202-DPB13101 DPA10202-DPB16501 DPA10301-DPB10101 DPA10301-DPB10201 DPA10301-DPB10202 DPA10301-DPB10401 DPA10301-DPB10402 DPA10301-DPB110501 DPA10301-DPB110601 DPA10301-DPB11801 DPA10301-DPB12301 DPA10301-DPB13901 DPA10301-DPB14001 DPA10301-DPB14901 DPA10301-DPB15501 DPA10301-DPB16501 DPA10301-DPB17501 DPA10301-DPB18001 DPA10401-DPB10101 DPA10401-DPB10201; note = HLAs: DPA10401-DPB10202 DPA10401-DPB10402 DPA10401-DPB10501 DPA10401-DPB110501 DPA10401-DPB14901
PPFLWSGFELHPDK

SEQ ID NO: 6532 - protein, 20 aa, synthetic construct
  source 1..20: note = Seed: KEPPFLWMGYELHPDKWTVQ; note = HLAs: DPA10103-DPB10101 DPA10103-DPB10201 DPA10103-DPB10202 DPA10103-DPB10401 DPA10103-DPB10402 DPA10103-DPB10501 DPA10103-DPB110501 DPA10103-DPB112601 DPA10103-DPB11501 DPA10103-DPB11601 DPA10103-DPB11801 DPA10103-DPB11901 DPA10103-DPB12301 DPA10103-DPB13101 DPA10103-DPB13401 DPA10103-DPB13901 DPA10103-DPB14001 DPA10103-DPB14101 DPA10103-DPB14801 DPA10103-DPB14901 DPA10103-DPB15001 DPA10103-DPB15101 DPA10103-DPB15501 DPA10103-DPB15901 DPA10103-DPB18001 DPA10104-DPB10101 DPA10104-DPB11501 DPA10105-DPB10101 DPA10105-DPB10401 DPA10105-DPB11801 DPA10105-DPB15001 DPA10106-DPB10101 DPA10201-DPB10101 DPA10201-DPB10201 DPA10201-DPB10202 DPA10201-DPB10401 DPA10201-DPB10501 DPA10201-DPB110601 DPA10201-DPB11501 DPA10201-DPB11601 DPA10201-DPB11901 DPA10201-DPB13401 DPA10201-DPB15501 DPA10202-DPB10101 DPA10202-DPB10201 DPA10202-DPB10202 DPA10202-DPB10401 DPA10202-DPB10501 DPA10202-DPB110601 DPA10202-DPB11101 DPA10202-DPB11301 DPA10202-DPB11801 DPA10202-DPB11901 DPA10202-DPB13101 DPA10202-DPB13801; note = HLAs: DPA10202-DPB15501 DPA10202-DPB16501 DPA10301-DPB10101 DPA10301-DPB10201 DPA10301-DPB10202 DPA10301-DPB10401 DPA10301-DPB10402 DPA10301-DPB110501 DPA10301-DPB110601 DPA10301-DPB11101 DPA10301-DPB11301 DPA10301-DPB11801 DPA10301-DPB12301 DPA10301-DPB13901 DPA10301-DPB14001 DPA10301-DPB14901 DPA10301-DPB15501 DPA10301-DPB16501 DPA10301-DPB17501 DPA10301-DPB18001 DPA10401-DPB10101 DPA10401-DPB10201 DPA10401-DPB10202 DPA10401-DPB10402 DPA10401-DPB10501 DPA10401-DPB110501 DPA10401-DPB14901
KEPPYLWHGFELMPDKWTVQ

SEQ ID NO: 6533 - protein, 14 aa, synthetic construct
  source 1..14: note = Seed: PPFLWMGYELHPDK; note = HLAs: DPA10103-DPB10101 DPA10103-DPB10201 DPA10103-DPB10202 DPA10103-DPB10401 DPA10103-DPB112601 DPA10103-DPB11501 DPA10103-DPB11601 DPA10103-DPB11901 DPA10103-DPB12301 DPA10103-DPB13101 DPA10103-DPB13401 DPA10103-DPB13901 DPA10103-DPB14001 DPA10103-DPB14101 DPA10103-DPB14801 DPA10103-DPB15001 DPA10103-DPB15901 DPA10104-DPB10101 DPA10104-DPB11501 DPA10105-DPB10101 DPA10105-DPB10401 DPA10105-DPB15001 DPA10106-DPB10101 DPA10201-DPB10101 DPA10201-DPB110601 DPA10201-DPB11501 DPA10201-DPB11601 DPA10201-DPB11901 DPA10202-DPB10101 DPA10202-DPB10201 DPA10202-DPB10202 DPA10202-DPB10401 DPA10202-DPB110601 DPA10202-DPB11901 DPA10202-DPB13101 DPA10202-DPB16501 DPA10301-DPB10101 DPA10301-DPB10201 DPA10301-DPB10202 DPA10301-DPB10401 DPA10301-DPB10402 DPA10301-DPB110501 DPA10301-DPB110601 DPA10301-DPB11801 DPA10301-DPB12301 DPA10301-DPB13901 DPA10301-DPB14001 DPA10301-DPB14901 DPA10301-DPB15501 DPA10301-DPB16501 DPA10301-DPB17501 DPA10301-DPB18001 DPA10401-DPB10101 DPA10401-DPB10201; note = HLAs: DPA10401-DPB10202 DPA10401-DPB10402 DPA10401-DPB10501 DPA10401-DPB110501 DPA10401-DPB14901
PPILWNGFELLPDK

SEQ ID NO: 6534 - protein, 14 aa, synthetic construct
  source 1..14: note = Seed: PPFLWMGYELHPDK; note = HLAs: DPA10103-DPB10101 DPA10103-DPB10201 DPA10103-DPB10202 DPA10103-DPB10401 DPA10103-DPB112601 DPA10103-DPB11501 DPA10103-DPB11601 DPA10103-DPB11901 DPA10103-DPB12301 DPA10103-DPB13101 DPA10103-DPB13401 DPA10103-DPB13901 DPA10103-DPB14001 DPA10103-DPB14101 DPA10103-DPB14801 DPA10103-DPB15001 DPA10103-DPB15901 DPA10104-DPB10101 DPA10104-DPB11501 DPA10105-DPB10101 DPA10105-DPB10401 DPA10105-DPB15001 DPA10106-DPB10101 DPA10201-DPB10101 DPA10201-DPB110601 DPA10201-DPB11501 DPA10201-DPB11601 DPA10201-DPB11901 DPA10202-DPB10101 DPA10202-DPB10201 DPA10202-DPB10202 DPA10202-DPB10401 DPA10202-DPB110601 DPA10202-DPB11901 DPA10202-DPB13101 DPA10202-DPB16501 DPA10301-DPB10101 DPA10301-DPB10201 DPA10301-DPB10202 DPA10301-DPB10401 DPA10301-DPB10402 DPA10301-DPB110501 DPA10301-DPB110601 DPA10301-DPB11801 DPA10301-DPB12301 DPA10301-DPB13901 DPA10301-DPB14001 DPA10301-DPB14901 DPA10301-DPB15501 DPA10301-DPB16501 DPA10301-DPB17501 DPA10301-DPB18001 DPA10401-DPB10101 DPA10401-DPB10201; note = HLAs: DPA10401-DPB10202 DPA10401-DPB10402 DPA10401-DPB10501 DPA10401-DPB110501 DPA10401-DPB14901
PPFLWFGFELYPDK

SEQ ID NO: 6535 - protein, 14 aa, synthetic construct
  source 1..14: note = Seed: PPFLWMGYELHPDK; note = HLAs: DRB1_1001 DPA10103-DPB10101 DPA10103-DPB10201 DPA10103-DPB10202 DPA10103-DPB10401 DPA10103-DPB112601 DPA10103-DPB11501 DPA10103-DPB11601 DPA10103-DPB11901 DPA10103-DPB12301 DPA10103-DPB13101 DPA10103-DPB13401 DPA10103-DPB13901 DPA10103-DPB14001 DPA10103-DPB14101 DPA10103-DPB14801 DPA10103-DPB15001 DPA10103-DPB15901 DPA10104-DPB10101 DPA10104-DPB11501 DPA10105-DPB10101 DPA10105-DPB10401 DPA10105-DPB15001 DPA10106-DPB10101 DPA10201-DPB10101 DPA10201-DPB110601 DPA10201-DPB11501 DPA10201-DPB11601 DPA10201-DPB11901 DPA10202-DPB10101 DPA10202-DPB10201 DPA10202-DPB10202 DPA10202-DPB10401 DPA10202-DPB110601 DPA10202-DPB11901 DPA10202-DPB13101 DPA10202-DPB16501 DPA10301-DPB10101 DPA10301-DPB10201 DPA10301-DPB10202 DPA10301-DPB10401 DPA10301-DPB10402 DPA10301-DPB110501 DPA10301-DPB110601 DPA10301-DPB11801 DPA10301-DPB12301 DPA10301-DPB13901 DPA10301-DPB14001 DPA10301-DPB14901 DPA10301-DPB15501 DPA10301-DPB16501 DPA10301-DPB17501 DPA10301-DPB18001 DPA10401-DPB10101 DPA10401-DPB10201; note = HLAs: DPA10401-DPB10202 DPA10401-DPB10402 DPA10401-DPB10501 DPA10401-DPB110501 DPA10401-DPB14901
PPFLWQGYELLPDK

SEQ ID NO: 6536 - protein, 14 aa, synthetic construct
  source 1..14: note = Seed: PPFLWMGYELHPDK; note = HLAs: DPA10103-DPB10101 DPA10103-DPB10201 DPA10103-DPB10202 DPA10103-DPB10401 DPA10103-DPB112601 DPA10103-DPB11501 DPA10103-DPB11601 DPA10103-DPB11901 DPA10103-DPB12301 DPA10103-DPB13101 DPA10103-DPB13401 DPA10103-DPB13901 DPA10103-DPB14001 DPA10103-DPB14101 DPA10103-DPB14801 DPA10103-DPB15001 DPA10103-DPB15901 DPA10104-DPB10101 DPA10104-DPB11501 DPA10105-DPB10101 DPA10105-DPB10401 DPA10105-DPB15001 DPA10106-DPB10101 DPA10201-DPB10101 DPA10201-DPB110601 DPA10201-DPB11501 DPA10201-DPB11601 DPA10201-DPB11901 DPA10202-DPB10101 DPA10202-DPB10201 DPA10202-DPB10202 DPA10202-DPB10401 DPA10202-DPB110601 DPA10202-DPB11901 DPA10202-DPB13101 DPA10202-DPB16501 DPA10301-DPB10101 DPA10301-DPB10201 DPA10301-DPB10202 DPA10301-DPB10401 DPA10301-DPB10402 DPA10301-DPB110501 DPA10301-DPB110601 DPA10301-DPB11801 DPA10301-DPB12301 DPA10301-DPB13901 DPA10301-DPB14001 DPA10301-DPB14901 DPA10301-DPB15501 DPA10301-DPB16501 DPA10301-DPB17501 DPA10301-DPB18001 DPA10401-DPB10101 DPA10401-DPB10201; note = HLAs: DPA10401-DPB10202 DPA10401-DPB10402 DPA10401-DPB10501 DPA10401-DPB110501 DPA10401-DPB14901
PPFLWEGWELVPDK

SEQ ID NO: 6537 - protein, 14 aa, synthetic construct
  source 1..14: note = Seed: PPFLWMGYELHPDK; note = HLAs: DPA10103-DPB10101 DPA10103-DPB10201 DPA10103-DPB10202 DPA10103-DPB10401 DPA10103-DPB112601 DPA10103-DPB11501 DPA10103-DPB11601 DPA10103-DPB11901 DPA10103-DPB12301 DPA10103-DPB13101 DPA10103-DPB13401 DPA10103-DPB13901 DPA10103-DPB14001 DPA10103-DPB14101 DPA10103-DPB14801 DPA10103-DPB15001 DPA10103-DPB15901 DPA10104-DPB10101 DPA10104-DPB11501 DPA10105-DPB10101 DPA10105-DPB10401 DPA10105-DPB15001 DPA10106-DPB10101 DPA10201-DPB10101 DPA10201-DPB110601 DPA10201-DPB11501 DPA10201-DPB11601 DPA10201-DPB11901 DPA10202-DPB10101 DPA10202-DPB10201 DPA10202-DPB10202 DPA10202-DPB10401 DPA10202-DPB110601 DPA10202-DPB11901 DPA10202-DPB13101 DPA10202-DPB16501 DPA10301-DPB10101 DPA10301-DPB10201 DPA10301-DPB10202 DPA10301-DPB10401 DPA10301-DPB10402 DPA10301-DPB110501 DPA10301-DPB110601 DPA10301-DPB11801 DPA10301-DPB12301 DPA10301-DPB13901 DPA10301-DPB14001 DPA10301-DPB14901 DPA10301-DPB15501 DPA10301-DPB16501 DPA10301-DPB17501 DPA10301-DPB18001 DPA10401-DPB10101 DPA10401-DPB10201; note = HLAs: DPA10401-DPB10202 DPA10401-DPB10402 DPA10401-DPB10501 DPA10401-DPB110501 DPA10401-DPB14901
PPYLWHGFELFPDK

SEQ ID NO: 6538 - protein, 14 aa, synthetic construct
  source 1..14: note = Seed: PPFLWMGYELHPDK; note = HLAs: DPA10103-DPB10101 DPA10103-DPB10201 DPA10103-DPB10202 DPA10103-DPB10401 DPA10103-DPB112601 DPA10103-DPB11501 DPA10103-DPB11601 DPA10103-DPB11901 DPA10103-DPB12301 DPA10103-DPB13101 DPA10103-DPB13401 DPA10103-DPB13901 DPA10103-DPB14001 DPA10103-DPB14101 DPA10103-DPB14801 DPA10103-DPB15001 DPA10103-DPB15901 DPA10104-DPB10101 DPA10104-DPB11501 DPA10105-DPB10101 DPA10105-DPB10401 DPA10105-DPB15001 DPA10106-DPB10101 DPA10201-DPB10101 DPA10201-DPB110601 DPA10201-DPB11501 DPA10201-DPB11601 DPA10201-DPB11901 DPA10202-DPB10101 DPA10202-DPB10201 DPA10202-DPB10202 DPA10202-DPB10401 DPA10202-DPB110601 DPA10202-DPB11901 DPA10202-DPB13101 DPA10202-DPB16501 DPA10301-DPB10101 DPA10301-DPB10201 DPA10301-DPB10202 DPA10301-DPB10401 DPA10301-DPB10402 DPA10301-DPB110501 DPA10301-DPB110601 DPA10301-DPB11801 DPA10301-DPB12301 DPA10301-DPB13901 DPA10301-DPB14001 DPA10301-DPB14901 DPA10301-DPB15501 DPA10301-DPB16501 DPA10301-DPB17501 DPA10301-DPB18001 DPA10401-DPB10101 DPA10401-DPB10201; note = HLAs: DPA10401-DPB10202 DPA10401-DPB10402 DPA10401-DPB10501 DPA10401-DPB110501 DPA10401-DPB14901
PPFLWHGWELLPDK

SEQ ID NO: 6539 - protein, 20 aa, synthetic construct
  source 1..20: note = Seed: KEPPFLWMGYELHPDKWTVQ; note = HLAs: DRB1_0101 DPA10103-DPB10101 DPA10103-DPB10201 DPA10103-DPB10202 DPA10103-DPB10401 DPA10103-DPB10402 DPA10103-DPB10501 DPA10103-DPB110501 DPA10103-DPB112601 DPA10103-DPB11501 DPA10103-DPB11601 DPA10103-DPB11801 DPA10103-DPB11901 DPA10103-DPB12301 DPA10103-DPB13101 DPA10103-DPB13401 DPA10103-DPB13901 DPA10103-DPB14001 DPA10103-DPB14101 DPA10103-DPB14801 DPA10103-DPB14901 DPA10103-DPB15001 DPA10103-DPB15101 DPA10103-DPB15501 DPA10103-DPB15901 DPA10103-DPB18001 DPA10104-DPB10101 DPA10104-DPB11501 DPA10105-DPB10101 DPA10105-DPB10401 DPA10105-DPB11801 DPA10105-DPB15001 DPA10106-DPB10101 DPA10201-DPB10101 DPA10201-DPB10201 DPA10201-DPB10202 DPA10201-DPB10401 DPA10201-DPB10501 DPA10201-DPB110601 DPA10201-DPB11501 DPA10201-DPB11601 DPA10201-DPB11901 DPA10201-DPB13401 DPA10201-DPB15501 DPA10202-DPB10101 DPA10202-DPB10201 DPA10202-DPB10202 DPA10202-DPB10401 DPA10202-DPB10501 DPA10202-DPB110601 DPA10202-DPB11101 DPA10202-DPB11301 DPA10202-DPB11801 DPA10202-DPB11901 DPA10202-DPB13101; note = HLAs: DPA10202-DPB13801 DPA10202-DPB15501 DPA10202-DPB16501 DPA10301-DPB10101 DPA10301-DPB10201 DPA10301-DPB10202 DPA10301-DPB10401 DPA10301-DPB10402 DPA10301-DPB110501 DPA10301-DPB110601 DPA10301-DPB11101 DPA10301-DPB11301 DPA10301-DPB11801 DPA10301-DPB12301 DPA10301-DPB13901 DPA10301-DPB14001 DPA10301-DPB14901 DPA10301-DPB15501 DPA10301-DPB16501 DPA10301-DPB17501 DPA10301-DPB18001 DPA10401-DPB10101 DPA10401-DPB10201 DPA10401-DPB10202 DPA10401-DPB10402 DPA10401-DPB10501 DPA10401-DPB110501 DPA10401-DPB14901
KEPPFLWHGYELVPDKWTVQ

SEQ ID NO: 6540 - protein, 14 aa, synthetic construct
  source 1..14: note = Seed: PPFLWMGYELHPDK; note = HLAs: DPA10103-DPB10101 DPA10103-DPB10201 DPA10103-DPB10202 DPA10103-DPB10401 DPA10103-DPB112601 DPA10103-DPB11501 DPA10103-DPB11601 DPA10103-DPB11901 DPA10103-DPB12301 DPA10103-DPB13101 DPA10103-DPB13401 DPA10103-DPB13901 DPA10103-DPB14001 DPA10103-DPB14101 DPA10103-DPB14801 DPA10103-DPB15001 DPA10103-DPB15901 DPA10104-DPB10101 DPA10104-DPB11501 DPA10105-DPB10101 DPA10105-DPB10401 DPA10105-DPB15001 DPA10106-DPB10101 DPA10201-DPB10101 DPA10201-DPB110601 DPA10201-DPB11501 DPA10201-DPB11601 DPA10201-DPB11901 DPA10202-DPB10101 DPA10202-DPB10201 DPA10202-DPB10202 DPA10202-DPB10401 DPA10202-DPB110601 DPA10202-DPB11901 DPA10202-DPB13101 DPA10202-DPB16501 DPA10301-DPB10101 DPA10301-DPB10201 DPA10301-DPB10202 DPA10301-DPB10401 DPA10301-DPB10402 DPA10301-DPB110501 DPA10301-DPB110601 DPA10301-DPB11801 DPA10301-DPB12301 DPA10301-DPB13901 DPA10301-DPB14001 DPA10301-DPB14901 DPA10301-DPB15501 DPA10301-DPB16501 DPA10301-DPB17501 DPA10301-DPB18001 DPA10401-DPB10101 DPA10401-DPB10201; note = HLAs: DPA10401-DPB10202 DPA10401-DPB10402 DPA10401-DPB10501 DPA10401-DPB110501 DPA10401-DPB14901
PPILWIGFELLPDK

SEQ ID NO: 6541 - protein, 14 aa, synthetic construct
  source 1..14: note = Seed: PPFLWMGYELHPDK; note = HLAs: DPA10103-DPB10101 DPA10103-DPB10201 DPA10103-DPB10202 DPA10103-DPB10401 DPA10103-DPB112601 DPA10103-DPB11501 DPA10103-DPB11601 DPA10103-DPB11901 DPA10103-DPB12301 DPA10103-DPB13101 DPA10103-DPB13401 DPA10103-DPB13901 DPA10103-DPB14001 DPA10103-DPB14101 DPA10103-DPB14801 DPA10103-DPB15001 DPA10103-DPB15901 DPA10104-DPB10101 DPA10104-DPB11501 DPA10105-DPB10101 DPA10105-DPB10401 DPA10105-DPB15001 DPA10106-DPB10101 DPA10201-DPB10101 DPA10201-DPB110601 DPA10201-DPB11501 DPA10201-DPB11601 DPA10201-DPB11901 DPA10202-DPB10101 DPA10202-DPB10201 DPA10202-DPB10202 DPA10202-DPB10401 DPA10202-DPB110601 DPA10202-DPB11901 DPA10202-DPB13101 DPA10202-DPB16501 DPA10301-DPB10101 DPA10301-DPB10201 DPA10301-DPB10202 DPA10301-DPB10401 DPA10301-DPB10402 DPA10301-DPB110501 DPA10301-DPB110601 DPA10301-DPB11801 DPA10301-DPB12301 DPA10301-DPB13901 DPA10301-DPB14001 DPA10301-DPB14901 DPA10301-DPB15501 DPA10301-DPB16501 DPA10301-DPB17501 DPA10301-DPB18001 DPA10401-DPB10101 DPA10401-DPB10201; note = HLAs: DPA10401-DPB10202 DPA10401-DPB10402 DPA10401-DPB10501 DPA10401-DPB110501 DPA10401-DPB14901
PPFLWHGYELIPDK

SEQ ID NO: 6542 - protein, 20 aa, synthetic construct
  source 1..20: note = Seed: KEPPFLWMGYELHPDKWTVQ; note = HLAs: DPA10103-DPB10101 DPA10103-DPB10201 DPA10103-DPB10202 DPA10103-DPB10401 DPA10103-DPB10402 DPA10103-DPB10501 DPA10103-DPB110501 DPA10103-DPB112601 DPA10103-DPB11501 DPA10103-DPB11601 DPA10103-DPB11801 DPA10103-DPB11901 DPA10103-DPB12301 DPA10103-DPB13101 DPA10103-DPB13401 DPA10103-DPB13901 DPA10103-DPB14001 DPA10103-DPB14101 DPA10103-DPB14801 DPA10103-DPB14901 DPA10103-DPB15001 DPA10103-DPB15101 DPA10103-DPB15501 DPA10103-DPB15901 DPA10103-DPB18001 DPA10104-DPB10101 DPA10104-DPB11501 DPA10105-DPB10101 DPA10105-DPB10401 DPA10105-DPB11801 DPA10105-DPB15001 DPA10106-DPB10101 DPA10201-DPB10101 DPA10201-DPB10201 DPA10201-DPB10202 DPA10201-DPB10401 DPA10201-DPB10501 DPA10201-DPB110601 DPA10201-DPB11501 DPA10201-DPB11601 DPA10201-DPB11901 DPA10201-DPB13401 DPA10201-DPB15501 DPA10202-DPB10101 DPA10202-DPB10201 DPA10202-DPB10202 DPA10202-DPB10401 DPA10202-DPB10501 DPA10202-DPB110601 DPA10202-DPB11101 DPA10202-DPB11301 DPA10202-DPB11801 DPA10202-DPB11901 DPA10202-DPB13101 DPA10202-DPB13801; note = HLAs: DPA10202-DPB15501 DPA10202-DPB16501 DPA10301-DPB10101 DPA10301-DPB10201 DPA10301-DPB10202 DPA10301-DPB10401 DPA10301-DPB10402 DPA10301-DPB110501 DPA10301-DPB110601 DPA10301-DPB11301 DPA10301-DPB11801 DPA10301-DPB12301 DPA10301-DPB13901 DPA10301-DPB14001 DPA10301-DPB14901 DPA10301-DPB15501 DPA10301-DPB16501 DPA10301-DPB17501 DPA10301-DPB18001 DPA10401-DPB10101 DPA10401-DPB10201 DPA10401-DPB10202 DPA10401-DPB10402 DPA10401-DPB10501 DPA10401-DPB110501 DPA10401-DPB14901
KEPPLLWNGFELLPDKWTVQ

SEQ ID NO: 6543 - protein, 20 aa, synthetic construct
  source 1..20: note = Seed: KEPPFLWMGYELHPDKWTVQ; note = HLAs: DPA10103-DPB10101 DPA10103-DPB10201 DPA10103-DPB10202 DPA10103-DPB10401 DPA10103-DPB10402 DPA10103-DPB10501 DPA10103-DPB110501 DPA10103-DPB112601 DPA10103-DPB11501 DPA10103-DPB11601 DPA10103-DPB11801 DPA10103-DPB11901 DPA10103-DPB12301 DPA10103-DPB13101 DPA10103-DPB13401 DPA10103-DPB13901 DPA10103-DPB14001 DPA10103-DPB14101 DPA10103-DPB14801 DPA10103-DPB14901 DPA10103-DPB15001 DPA10103-DPB15101 DPA10103-DPB15501 DPA10103-DPB15901 DPA10103-DPB18001 DPA10104-DPB10101 DPA10104-DPB11501 DPA10105-DPB10101 DPA10105-DPB10401 DPA10105-DPB11801 DPA10105-DPB15001 DPA10106-DPB10101 DPA10201-DPB10101 DPA10201-DPB10201 DPA10201-DPB10202 DPA10201-DPB10401 DPA10201-DPB10501 DPA10201-DPB110601 DPA10201-DPB11501 DPA10201-DPB11601 DPA10201-DPB11901 DPA10201-DPB13401 DPA10201-DPB15501 DPA10202-DPB10101 DPA10202-DPB10201 DPA10202-DPB10202 DPA10202-DPB10401 DPA10202-DPB10501 DPA10202-DPB110601 DPA10202-DPB11101 DPA10202-DPB11301 DPA10202-DPB11801 DPA10202-DPB11901 DPA10202-DPB13101 DPA10202-DPB13801; note = HLAs: DPA10202-DPB15501 DPA10202-DPB16501 DPA10301-DPB10101 DPA10301-DPB10201 DPA10301-DPB10202 DPA10301-DPB10401 DPA10301-DPB10402 DPA10301-DPB110501 DPA10301-DPB110601 DPA10301-DPB11101 DPA10301-DPB11301 DPA10301-DPB11801 DPA10301-DPB12301 DPA10301-DPB13901 DPA10301-DPB14001 DPA10301-DPB14901 DPA10301-DPB15501 DPA10301-DPB16501 DPA10301-DPB17501 DPA10301-DPB18001 DPA10401-DPB10101 DPA10401-DPB10201 DPA10401-DPB10202 DPA10401-DPB10402 DPA10401-DPB10501 DPA10401-DPB110501 DPA10401-DPB14901
KEPPLLWSGFELTPDKWTVQ

SEQ ID NO: 6544 - protein, 20 aa, synthetic construct
  source 1..20: note = Seed: KEPPFLWMGYELHPDKWTVQ; note = HLAs: DPA10103-DPB10101 DPA10103-DPB10201 DPA10103-DPB10202 DPA10103-DPB10401 DPA10103-DPB10402 DPA10103-DPB10501 DPA10103-DPB110501 DPA10103-DPB112601 DPA10103-DPB11501 DPA10103-DPB11601 DPA10103-DPB11801 DPA10103-DPB11901 DPA10103-DPB12301 DPA10103-DPB13101 DPA10103-DPB13401 DPA10103-DPB13901 DPA10103-DPB14001 DPA10103-DPB14101 DPA10103-DPB14801 DPA10103-DPB14901 DPA10103-DPB15001 DPA10103-DPB15101 DPA10103-DPB15501 DPA10103-DPB15901 DPA10103-DPB18001 DPA10104-DPB10101 DPA10104-DPB11501 DPA10105-DPB10101 DPA10105-DPB10401 DPA10105-DPB11801 DPA10105-DPB15001 DPA10106-DPB10101 DPA10201-DPB10101 DPA10201-DPB10201 DPA10201-DPB10202 DPA10201-DPB10401 DPA10201-DPB10501 DPA10201-DPB110601 DPA10201-DPB11501 DPA10201-DPB11601 DPA10201-DPB11901 DPA10201-DPB13401 DPA10201-DPB15501 DPA10202-DPB10101 DPA10202-DPB10201 DPA10202-DPB10202 DPA10202-DPB10401 DPA10202-DPB10501 DPA10202-DPB110601 DPA10202-DPB11101 DPA10202-DPB11301 DPA10202-DPB11801 DPA10202-DPB11901 DPA10202-DPB13101 DPA10202-DPB13801; note = HLAs: DPA10202-DPB15501 DPA10202-DPB16501 DPA10301-DPB10101 DPA10301-DPB10201 DPA10301-DPB10202 DPA10301-DPB10401 DPA10301-DPB10402 DPA10301-DPB110501 DPA10301-DPB110601 DPA10301-DPB11101 DPA10301-DPB11301 DPA10301-DPB11801 DPA10301-DPB12301 DPA10301-DPB13901 DPA10301-DPB14001 DPA10301-DPB14901 DPA10301-DPB15501 DPA10301-DPB16501 DPA10301-DPB17501 DPA10301-DPB18001 DPA10401-DPB10101 DPA10401-DPB10201 DPA10401-DPB10202 DPA10401-DPB10402 DPA10401-DPB10501 DPA10401-DPB110501 DPA10401-DPB14901
KEPPVLWTGFELVPDKWTVQ

SEQ ID NO: 6545 - protein, 20 aa, synthetic construct
  source 1..20: note = Seed: KEPPFLWMGYELHPDKWTVQ; note = HLAs: DPA10103-DPB10101 DPA10103-DPB10201 DPA10103-DPB10202 DPA10103-DPB10401 DPA10103-DPB10402 DPA10103-DPB10501 DPA10103-DPB110501 DPA10103-DPB112601 DPA10103-DPB11501 DPA10103-DPB11601 DPA10103-DPB11801 DPA10103-DPB11901 DPA10103-DPB12301 DPA10103-DPB13101 DPA10103-DPB13401 DPA10103-DPB13901 DPA10103-DPB14001 DPA10103-DPB14101 DPA10103-DPB14801 DPA10103-DPB14901 DPA10103-DPB15001 DPA10103-DPB15101 DPA10103-DPB15501 DPA10103-DPB15901 DPA10103-DPB18001 DPA10104-DPB10101 DPA10104-DPB11501 DPA10105-DPB10101 DPA10105-DPB10401 DPA10105-DPB11801 DPA10105-DPB15001 DPA10106-DPB10101 DPA10201-DPB10101 DPA10201-DPB10201 DPA10201-DPB10202 DPA10201-DPB10401 DPA10201-DPB10501 DPA10201-DPB110601 DPA10201-DPB11501 DPA10201-DPB11601 DPA10201-DPB11901 DPA10201-DPB13401 DPA10201-DPB15501 DPA10202-DPB10101 DPA10202-DPB10201 DPA10202-DPB10202 DPA10202-DPB10401 DPA10202-DPB10501 DPA10202-DPB110601 DPA10202-DPB11101 DPA10202-DPB11301 DPA10202-DPB11801 DPA10202-DPB11901 DPA10202-DPB13101 DPA10202-DPB13801; note = HLAs: DPA10202-DPB15501 DPA10202-DPB16501 DPA10301-DPB10101 DPA10301-DPB10201 DPA10301-DPB10202 DPA10301-DPB10401 DPA10301-DPB10402 DPA10301-DPB110501 DPA10301-DPB110601 DPA10301-DPB11101 DPA10301-DPB11301 DPA10301-DPB11801 DPA10301-DPB12301 DPA10301-DPB13901 DPA10301-DPB14001 DPA10301-DPB14901 DPA10301-DPB15501 DPA10301-DPB16501 DPA10301-DPB17501 DPA10301-DPB18001 DPA10401-DPB10101 DPA10401-DPB10201 DPA10401-DPB10202 DPA10401-DPB10402 DPA10401-DPB10501 DPA10401-DPB110501 DPA10401-DPB14901
KEPPVLWTGFELLPDKWTVQ

SEQ ID NO: 6546 - protein, 14 aa, synthetic construct
  source 1..14: note = Seed: PPFLWMGYELHPDK; note = HLAs: DPA10103-DPB10101 DPA10103-DPB10201 DPA10103-DPB10202 DPA10103-DPB10401 DPA10103-DPB112601 DPA10103-DPB11501 DPA10103-DPB11601 DPA10103-DPB11901 DPA10103-DPB12301 DPA10103-DPB13101 DPA10103-DPB13401 DPA10103-DPB13901 DPA10103-DPB14001 DPA10103-DPB14101 DPA10103-DPB14801 DPA10103-DPB15001 DPA10103-DPB15901 DPA10104-DPB10101 DPA10104-DPB11501 DPA10105-DPB10101 DPA10105-DPB10401 DPA10105-DPB15001 DPA10106-DPB10101 DPA10201-DPB10101 DPA10201-DPB110601 DPA10201-DPB11501 DPA10201-DPB11601 DPA10201-DPB11901 DPA10202-DPB10101 DPA10202-DPB10201 DPA10202-DPB10202 DPA10202-DPB10401 DPA10202-DPB110601 DPA10202-DPB11901 DPA10202-DPB13101 DPA10202-DPB16501 DPA10301-DPB10101 DPA10301-DPB10201 DPA10301-DPB10202 DPA10301-DPB10401 DPA10301-DPB10402 DPA10301-DPB110501 DPA10301-DPB110601 DPA10301-DPB11801 DPA10301-DPB12301 DPA10301-DPB13901 DPA10301-DPB14001 DPA10301-DPB14901 DPA10301-DPB16501 DPA10301-DPB17501 DPA10301-DPB18001 DPA10401-DPB10101 DPA10401-DPB10201 DPA10401-DPB10202; note = HLAs: DPA10401-DPB10402 DPA10401-DPB10501 DPA10401-DPB110501 DPA10401-DPB14901
PPMLWIGFELLPDK

SEQ ID NO: 6547 - protein, 20 aa, synthetic construct
  source 1..20: note = Seed: KEPPFLWMGYELHPDKWTVQ; note = HLAs: DRB1_0101 DRB1_1001 DPA10103-DPB10101 DPA10103-DPB10201 DPA10103-DPB10202 DPA10103-DPB10401 DPA10103-DPB10402 DPA10103-DPB10501 DPA10103-DPB110501 DPA10103-DPB112601 DPA10103-DPB11501 DPA10103-DPB11601 DPA10103-DPB11801 DPA10103-DPB11901 DPA10103-DPB12301 DPA10103-DPB13101 DPA10103-DPB13401 DPA10103-DPB13901 DPA10103-DPB14001 DPA10103-DPB14101 DPA10103-DPB14801 DPA10103-DPB14901 DPA10103-DPB15001 DPA10103-DPB15101 DPA10103-DPB15501 DPA10103-DPB15901 DPA10103-DPB18001 DPA10104-DPB10101 DPA10104-DPB11501 DPA10105-DPB10101 DPA10105-DPB10401 DPA10105-DPB11801 DPA10105-DPB15001 DPA10106-DPB10101 DPA10201-DPB10101 DPA10201-DPB10201 DPA10201-DPB10202 DPA10201-DPB10401 DPA10201-DPB10501 DPA10201-DPB110601 DPA10201-DPB11501 DPA10201-DPB11601 DPA10201-DPB11901 DPA10201-DPB13401 DPA10201-DPB15501 DPA10202-DPB10101 DPA10202-DPB10201 DPA10202-DPB10202 DPA10202-DPB10401 DPA10202-DPB10501 DPA10202-DPB110601 DPA10202-DPB11101 DPA10202-DPB11301 DPA10202-DPB11801 DPA10202-DPB11901; note = HLAs: DPA10202-DPB13101 DPA10202-DPB13801 DPA10202-DPB15501 DPA10202-DPB16501 DPA10301-DPB10101 DPA10301-DPB10201 DPA10301-DPB10202 DPA10301-DPB10401 DPA10301-DPB10402 DPA10301-DPB110501 DPA10301-DPB110601 DPA10301-DPB11101 DPA10301-DPB11301 DPA10301-DPB11801 DPA10301-DPB12301 DPA10301-DPB13901 DPA10301-DPB14001 DPA10301-DPB14901 DPA10301-DPB15501 DPA10301-DPB16501 DPA10301-DPB17501 DPA10301-DPB18001 DPA10401-DPB10101 DPA10401-DPB10201 DPA10401-DPB10202 DPA10401-DPB10402 DPA10401-DPB10501 DPA10401-DPB110501 DPA10401-DPB14901
KEPPFLWTGYELAPDKWTVQ

SEQ ID NO: 6548 - protein, 14 aa, synthetic construct
  source 1..14: note = Seed: PPFLWMGYELHPDK; note = HLAs: DPA10103-DPB10101 DPA10103-DPB10201 DPA10103-DPB10202 DPA10103-DPB10401 DPA10103-DPB112601 DPA10103-DPB11501 DPA10103-DPB11601 DPA10103-DPB11901 DPA10103-DPB12301 DPA10103-DPB13101 DPA10103-DPB13401 DPA10103-DPB13901 DPA10103-DPB14001 DPA10103-DPB14101 DPA10103-DPB14801 DPA10103-DPB15001 DPA10103-DPB15901 DPA10104-DPB10101 DPA10104-DPB11501 DPA10105-DPB10101 DPA10105-DPB10401 DPA10105-DPB15001 DPA10106-DPB10101 DPA10201-DPB10101 DPA10201-DPB110601 DPA10201-DPB11501 DPA10201-DPB11601 DPA10201-DPB11901 DPA10202-DPB10101 DPA10202-DPB10201 DPA10202-DPB10202 DPA10202-DPB10401 DPA10202-DPB110601 DPA10202-DPB11901 DPA10202-DPB13101 DPA10202-DPB16501 DPA10301-DPB10101 DPA10301-DPB10201 DPA10301-DPB10202 DPA10301-DPB10401 DPA10301-DPB10402 DPA10301-DPB110501 DPA10301-DPB110601 DPA10301-DPB11801 DPA10301-DPB12301 DPA10301-DPB13901 DPA10301-DPB14001 DPA10301-DPB14901 DPA10301-DPB15501 DPA10301-DPB16501 DPA10301-DPB17501 DPA10301-DPB18001 DPA10401-DPB10101 DPA10401-DPB10201; note = HLAs: DPA10401-DPB10202 DPA10401-DPB10402 DPA10401-DPB10501 DPA10401-DPB110501 DPA10401-DPB14901
PPWLWVGFELVPDK

SEQ ID NO: 6549 - protein, 14 aa, synthetic construct
  source 1..14: note = Seed: PPFLWMGYELHPDK; note = HLAs: DRB1_1001 DPA10103-DPB10101 DPA10103-DPB10201 DPA10103-DPB10202 DPA10103-DPB10401 DPA10103-DPB112601 DPA10103-DPB11501 DPA10103-DPB11601 DPA10103-DPB11901 DPA10103-DPB12301 DPA10103-DPB13101 DPA10103-DPB13401 DPA10103-DPB13901 DPA10103-DPB14001 DPA10103-DPB14101 DPA10103-DPB14801 DPA10103-DPB15001 DPA10103-DPB15901 DPA10104-DPB10101 DPA10104-DPB11501 DPA10105-DPB10101 DPA10105-DPB10401 DPA10105-DPB15001 DPA10106-DPB10101 DPA10201-DPB10101 DPA10201-DPB110601 DPA10201-DPB11501 DPA10201-DPB11601 DPA10201-DPB11901 DPA10202-DPB10101 DPA10202-DPB10201 DPA10202-DPB10202 DPA10202-DPB10401 DPA10202-DPB110601 DPA10202-DPB11901 DPA10202-DPB13101 DPA10202-DPB16501 DPA10301-DPB10101 DPA10301-DPB10201 DPA10301-DPB10202 DPA10301-DPB10401 DPA10301-DPB10402 DPA10301-DPB110501 DPA10301-DPB110601 DPA10301-DPB11801 DPA10301-DPB12301 DPA10301-DPB13901 DPA10301-DPB14001 DPA10301-DPB14901 DPA10301-DPB15501 DPA10301-DPB16501 DPA10301-DPB17501 DPA10301-DPB18001 DPA10401-DPB10101 DPA10401-DPB10201; note = HLAs: DPA10401-DPB10202 DPA10401-DPB10402 DPA10401-DPB10501 DPA10401-DPB110501 DPA10401-DPB14901
PPFLWFGYELVPDK

SEQ ID NO: 6550 - protein, 14 aa, synthetic construct
  source 1..14: note = Seed: PPFLWMGYELHPDK; note = HLAs: DPA10103-DPB10101 DPA10103-DPB10201 DPA10103-DPB10202 DPA10103-DPB10401 DPA10103-DPB112601 DPA10103-DPB11501 DPA10103-DPB11601 DPA10103-DPB11901 DPA10103-DPB12301 DPA10103-DPB13101 DPA10103-DPB13401 DPA10103-DPB13901 DPA10103-DPB14001 DPA10103-DPB14101 DPA10103-DPB14801 DPA10103-DPB15001 DPA10103-DPB15901 DPA10104-DPB10101 DPA10104-DPB11501 DPA10105-DPB10101 DPA10105-DPB10401 DPA10105-DPB15001 DPA10106-DPB10101 DPA10201-DPB10101 DPA10201-DPB110601 DPA10201-DPB11501 DPA10201-DPB11601 DPA10201-DPB11901 DPA10202-DPB10101 DPA10202-DPB10201 DPA10202-DPB10202 DPA10202-DPB10401 DPA10202-DPB110601 DPA10202-DPB11901 DPA10202-DPB13101 DPA10202-DPB16501 DPA10301-DPB10101 DPA10301-DPB10201 DPA10301-DPB10202 DPA10301-DPB10401 DPA10301-DPB10402 DPA10301-DPB110501 DPA10301-DPB110601 DPA10301-DPB11801 DPA10301-DPB12301 DPA10301-DPB13901 DPA10301-DPB14001 DPA10301-DPB14901 DPA10301-DPB15501 DPA10301-DPB16501 DPA10301-DPB17501 DPA10301-DPB18001 DPA10401-DPB10101 DPA10401-DPB10201; note = HLAs: DPA10401-DPB10202 DPA10401-DPB10402 DPA10401-DPB10501 DPA10401-DPB110501 DPA10401-DPB14901
PPFLWTGWELFPDK

SEQ ID NO: 6551 - protein, 20 aa, synthetic construct
  source 1..20: note = Seed: KEPPFLWMGYELHPDKWTVQ; note = HLAs: DRB1_1001 DPA10103-DPB10101 DPA10103-DPB10201 DPA10103-DPB10202 DPA10103-DPB10401 DPA10103-DPB10402 DPA10103-DPB10501 DPA10103-DPB110501 DPA10103-DPB112601 DPA10103-DPB11501 DPA10103-DPB11601 DPA10103-DPB11801 DPA10103-DPB11901 DPA10103-DPB12301 DPA10103-DPB13101 DPA10103-DPB13401 DPA10103-DPB13901 DPA10103-DPB14001 DPA10103-DPB14101 DPA10103-DPB14801 DPA10103-DPB14901 DPA10103-DPB15001 DPA10103-DPB15101 DPA10103-DPB15501 DPA10103-DPB15901 DPA10103-DPB18001 DPA10104-DPB10101 DPA10104-DPB11501 DPA10105-DPB10101 DPA10105-DPB10401 DPA10105-DPB11801 DPA10105-DPB15001 DPA10106-DPB10101 DPA10201-DPB10101 DPA10201-DPB10201 DPA10201-DPB10202 DPA10201-DPB10401 DPA10201-DPB10501 DPA10201-DPB110601 DPA10201-DPB11501 DPA10201-DPB11601 DPA10201-DPB11901 DPA10201-DPB13401 DPA10201-DPB15501 DPA10202-DPB10101 DPA10202-DPB10201 DPA10202-DPB10202 DPA10202-DPB10401 DPA10202-DPB10501 DPA10202-DPB110601 DPA10202-DPB11101 DPA10202-DPB11301 DPA10202-DPB11801 DPA10202-DPB11901 DPA10202-DPB13101; note = HLAs: DPA10202-DPB13801 DPA10202-DPB15501 DPA10202-DPB16501 DPA10301-DPB10101 DPA10301-DPB10201 DPA10301-DPB10202 DPA10301-DPB10401 DPA10301-DPB10402 DPA10301-DPB110501 DPA10301-DPB110601 DPA10301-DPB11101 DPA10301-DPB11301 DPA10301-DPB11801 DPA10301-DPB12301 DPA10301-DPB13901 DPA10301-DPB14001 DPA10301-DPB14901 DPA10301-DPB15501 DPA10301-DPB16501 DPA10301-DPB17501 DPA10301-DPB18001 DPA10401-DPB10101 DPA10401-DPB10201 DPA10401-DPB10202 DPA10401-DPB10402 DPA10401-DPB10501 DPA10401-DPB110501 DPA10401-DPB14901
KEPPFLWTGFELDPDKWTVQ

SEQ ID NO: 6552 - protein, 14 aa, synthetic construct
  source 1..14: note = Seed: PPFLWMGYELHPDK; note = HLAs: DPA10103-DPB10101 DPA10103-DPB10201 DPA10103-DPB10202 DPA10103-DPB10401 DPA10103-DPB112601 DPA10103-DPB11501 DPA10103-DPB11601 DPA10103-DPB11901 DPA10103-DPB12301 DPA10103-DPB13101 DPA10103-DPB13401 DPA10103-DPB13901 DPA10103-DPB14001 DPA10103-DPB14101 DPA10103-DPB14801 DPA10103-DPB15001 DPA10103-DPB15901 DPA10104-DPB10101 DPA10104-DPB11501 DPA10105-DPB10101 DPA10105-DPB10401 DPA10105-DPB15001 DPA10106-DPB10101 DPA10201-DPB10101 DPA10201-DPB110601 DPA10201-DPB11501 DPA10201-DPB11601 DPA10201-DPB11901 DPA10202-DPB10101 DPA10202-DPB10201 DPA10202-DPB10202 DPA10202-DPB10401 DPA10202-DPB110601 DPA10202-DPB11901 DPA10202-DPB13101 DPA10202-DPB16501 DPA10301-DPB10101 DPA10301-DPB10201 DPA10301-DPB10202 DPA10301-DPB10401 DPA10301-DPB10402 DPA10301-DPB110501 DPA10301-DPB110601 DPA10301-DPB11801 DPA10301-DPB12301 DPA10301-DPB13901 DPA10301-DPB14001 DPA10301-DPB14901 DPA10301-DPB15501 DPA10301-DPB16501 DPA10301-DPB17501 DPA10301-DPB18001 DPA10401-DPB10101 DPA10401-DPB10201; note = HLAs: DPA10401-DPB10202 DPA10401-DPB10402 DPA10401-DPB10501 DPA10401-DPB110501 DPA10401-DPB14901
PPYLWFGFELLPDK

SEQ ID NO: 6553 - protein, 20 aa, synthetic construct
  source 1..20: note = Seed: KEPPFLWMGYELHPDKWTVQ; note = HLAs: DRB1_0101 DRB1_1001 DPA10103-DPB10101 DPA10103-DPB10201 DPA10103-DPB10202 DPA10103-DPB10401 DPA10103-DPB10402 DPA10103-DPB10501 DPA10103-DPB110501 DPA10103-DPB112601 DPA10103-DPB11501 DPA10103-DPB11601 DPA10103-DPB11801 DPA10103-DPB11901 DPA10103-DPB12301 DPA10103-DPB13101 DPA10103-DPB13401 DPA10103-DPB13901 DPA10103-DPB14001 DPA10103-DPB14101 DPA10103-DPB14801 DPA10103-DPB14901 DPA10103-DPB15001 DPA10103-DPB15101 DPA10103-DPB15501 DPA10103-DPB15901 DPA10103-DPB18001 DPA10104-DPB10101 DPA10104-DPB11501 DPA10105-DPB10101 DPA10105-DPB10401 DPA10105-DPB11801 DPA10105-DPB15001 DPA10106-DPB10101 DPA10201-DPB10101 DPA10201-DPB10201 DPA10201-DPB10202 DPA10201-DPB10401 DPA10201-DPB10501 DPA10201-DPB110601 DPA10201-DPB11501 DPA10201-DPB11601 DPA10201-DPB11901 DPA10201-DPB13401 DPA10201-DPB15501 DPA10202-DPB10101 DPA10202-DPB10201 DPA10202-DPB10202 DPA10202-DPB10401 DPA10202-DPB10501 DPA10202-DPB110601 DPA10202-DPB11101 DPA10202-DPB11301 DPA10202-DPB11801 DPA10202-DPB11901; note = HLAs: DPA10202-DPB13101 DPA10202-DPB13801 DPA10202-DPB15501 DPA10202-DPB16501 DPA10301-DPB10101 DPA10301-DPB10201 DPA10301-DPB10202 DPA10301-DPB10401 DPA10301-DPB10402 DPA10301-DPB110501 DPA10301-DPB110601 DPA10301-DPB11101 DPA10301-DPB11301 DPA10301-DPB11801 DPA10301-DPB12301 DPA10301-DPB13901 DPA10301-DPB14001 DPA10301-DPB14901 DPA10301-DPB15501 DPA10301-DPB16501 DPA10301-DPB17501 DPA10301-DPB18001 DPA10401-DPB10101 DPA10401-DPB10201 DPA10401-DPB10202 DPA10401-DPB10402 DPA10401-DPB10501 DPA10401-DPB110501 DPA10401-DPB14901
KEPPFLWNGFELTPDKWTVQ

SEQ ID NO: 6554 - protein, 20 aa, synthetic construct
  source 1..20: note = Seed: KEPPFLWMGYELHPDKWTVQ; note = HLAs: DRB1_1001 DPA10103-DPB10101 DPA10103-DPB10201 DPA10103-DPB10202 DPA10103-DPB10401 DPA10103-DPB10402 DPA10103-DPB10501 DPA10103-DPB110501 DPA10103-DPB112601 DPA10103-DPB11501 DPA10103-DPB11601 DPA10103-DPB11801 DPA10103-DPB11901 DPA10103-DPB12301 DPA10103-DPB13101 DPA10103-DPB13401 DPA10103-DPB13901 DPA10103-DPB14001 DPA10103-DPB14101 DPA10103-DPB14801 DPA10103-DPB14901 DPA10103-DPB15001 DPA10103-DPB15101 DPA10103-DPB15501 DPA10103-DPB15901 DPA10103-DPB18001 DPA10104-DPB10101 DPA10104-DPB11501 DPA10105-DPB10101 DPA10105-DPB10401 DPA10105-DPB11801 DPA10105-DPB15001 DPA10106-DPB10101 DPA10201-DPB10101 DPA10201-DPB10201 DPA10201-DPB10202 DPA10201-DPB10401 DPA10201-DPB10501 DPA10201-DPB110601 DPA10201-DPB11501 DPA10201-DPB11601 DPA10201-DPB11901 DPA10201-DPB13401 DPA10201-DPB15501 DPA10202-DPB10101 DPA10202-DPB10201 DPA10202-DPB10202 DPA10202-DPB10401 DPA10202-DPB10501 DPA10202-DPB110601 DPA10202-DPB11101 DPA10202-DPB11301 DPA10202-DPB11801 DPA10202-DPB11901 DPA10202-DPB13101; note = HLAs: DPA10202-DPB13801 DPA10202-DPB15501 DPA10202-DPB16501 DPA10301-DPB10101 DPA10301-DPB10201 DPA10301-DPB10202 DPA10301-DPB10401 DPA10301-DPB10402 DPA10301-DPB110501 DPA10301-DPB110601 DPA10301-DPB11101 DPA10301-DPB11301 DPA10301-DPB11801 DPA10301-DPB12301 DPA10301-DPB13901 DPA10301-DPB14001 DPA10301-DPB14901 DPA10301-DPB15501 DPA10301-DPB16501 DPA10301-DPB17501 DPA10301-DPB18001 DPA10401-DPB10101 DPA10401-DPB10201 DPA10401-DPB10202 DPA10401-DPB10402 DPA10401-DPB10501 DPA10401-DPB110501 DPA10401-DPB14901
KEPPFLWEGFELNPDKWTVQ

SEQ ID NO: 6555 - protein, 20 aa, synthetic construct
  source 1..20: note = Seed: KEPPFLWMGYELHPDKWTVQ; note = HLAs: DPA10103-DPB10101 DPA10103-DPB10201 DPA10103-DPB10202 DPA10103-DPB10401 DPA10103-DPB10402 DPA10103-DPB10501 DPA10103-DPB110501 DPA10103-DPB112601 DPA10103-DPB11501 DPA10103-DPB11601 DPA10103-DPB11801 DPA10103-DPB11901 DPA10103-DPB12301 DPA10103-DPB13101 DPA10103-DPB13401 DPA10103-DPB13901 DPA10103-DPB14001 DPA10103-DPB14101 DPA10103-DPB14801 DPA10103-DPB14901 DPA10103-DPB15001 DPA10103-DPB15101 DPA10103-DPB15501 DPA10103-DPB15901 DPA10103-DPB18001 DPA10104-DPB10101 DPA10104-DPB11501 DPA10105-DPB10101 DPA10105-DPB10401 DPA10105-DPB11801 DPA10105-DPB15001 DPA10106-DPB10101 DPA10201-DPB10101 DPA10201-DPB10201 DPA10201-DPB10202 DPA10201-DPB10401 DPA10201-DPB10501 DPA10201-DPB110601 DPA10201-DPB11501 DPA10201-DPB11601 DPA10201-DPB11901 DPA10201-DPB13401 DPA10201-DPB15501 DPA10202-DPB10101 DPA10202-DPB10201 DPA10202-DPB10202 DPA10202-DPB10401 DPA10202-DPB10501 DPA10202-DPB110601 DPA10202-DPB11101 DPA10202-DPB11301 DPA10202-DPB11801 DPA10202-DPB11901 DPA10202-DPB13101 DPA10202-DPB13801; note = HLAs: DPA10202-DPB15501 DPA10202-DPB16501 DPA10301-DPB10101 DPA10301-DPB10201 DPA10301-DPB10202 DPA10301-DPB10401 DPA10301-DPB10402 DPA10301-DPB110501 DPA10301-DPB110601 DPA10301-DPB11101 DPA10301-DPB11301 DPA10301-DPB11801 DPA10301-DPB12301 DPA10301-DPB13901 DPA10301-DPB14001 DPA10301-DPB14901 DPA10301-DPB15501 DPA10301-DPB16501 DPA10301-DPB17501 DPA10301-DPB18001 DPA10401-DPB10101 DPA10401-DPB10201 DPA10401-DPB10202 DPA10401-DPB10402 DPA10401-DPB10501 DPA10401-DPB110501 DPA10401-DPB14901
KEPPFLWWGFELLPDKWTVQ

SEQ ID NO: 6556 - protein, 20 aa, synthetic construct
  source 1..20: note = Seed: KEPPFLWMGYELHPDKWTVQ; note = HLAs: DPA10103-DPB10101 DPA10103-DPB10201 DPA10103-DPB10202 DPA10103-DPB10401 DPA10103-DPB10402 DPA10103-DPB10501 DPA10103-DPB110501 DPA10103-DPB112601 DPA10103-DPB11501 DPA10103-DPB11601 DPA10103-DPB11801 DPA10103-DPB11901 DPA10103-DPB12301 DPA10103-DPB13101 DPA10103-DPB13401 DPA10103-DPB13901 DPA10103-DPB14001 DPA10103-DPB14101 DPA10103-DPB14801 DPA10103-DPB14901 DPA10103-DPB15001 DPA10103-DPB15101 DPA10103-DPB15501 DPA10103-DPB15901 DPA10103-DPB18001 DPA10104-DPB10101 DPA10104-DPB11501 DPA10105-DPB10101 DPA10105-DPB10401 DPA10105-DPB11801 DPA10105-DPB15001 DPA10106-DPB10101 DPA10201-DPB10101 DPA10201-DPB10201 DPA10201-DPB10202 DPA10201-DPB10401 DPA10201-DPB10501 DPA10201-DPB110601 DPA10201-DPB11501 DPA10201-DPB11601 DPA10201-DPB11901 DPA10201-DPB13401 DPA10201-DPB15501 DPA10202-DPB10101 DPA10202-DPB10201 DPA10202-DPB10202 DPA10202-DPB10401 DPA10202-DPB10501 DPA10202-DPB110601 DPA10202-DPB11101 DPA10202-DPB11301 DPA10202-DPB11801 DPA10202-DPB11901 DPA10202-DPB13101 DPA10202-DPB13801; note = HLAs: DPA10202-DPB15501 DPA10202-DPB16501 DPA10301-DPB10101 DPA10301-DPB10201 DPA10301-DPB10202 DPA10301-DPB10401 DPA10301-DPB10402 DPA10301-DPB110501 DPA10301-DPB110601 DPA10301-DPB11101 DPA10301-DPB11301 DPA10301-DPB11801 DPA10301-DPB12301 DPA10301-DPB13901 DPA10301-DPB14001 DPA10301-DPB14901 DPA10301-DPB15501 DPA10301-DPB16501 DPA10301-DPB17501 DPA10301-DPB18001 DPA10401-DPB10101 DPA10401-DPB10201 DPA10401-DPB10202 DPA10401-DPB10402 DPA10401-DPB10501 DPA10401-DPB110501 DPA10401-DPB14901
KEPPVLWSGFELIPDKWTVQ

SEQ ID NO: 6557 - protein, 20 aa, synthetic construct
  source 1..20: note = Seed: KEPPFLWMGYELHPDKWTVQ; note = HLAs: DPA10103-DPB10101 DPA10103-DPB10201 DPA10103-DPB10202 DPA10103-DPB10401 DPA10103-DPB10402 DPA10103-DPB10501 DPA10103-DPB110501 DPA10103-DPB112601 DPA10103-DPB11501 DPA10103-DPB11601 DPA10103-DPB11801 DPA10103-DPB11901 DPA10103-DPB12301 DPA10103-DPB13101 DPA10103-DPB13401 DPA10103-DPB13901 DPA10103-DPB14001 DPA10103-DPB14101 DPA10103-DPB14801 DPA10103-DPB14901 DPA10103-DPB15001 DPA10103-DPB15101 DPA10103-DPB15501 DPA10103-DPB15901 DPA10103-DPB18001 DPA10104-DPB10101 DPA10104-DPB11501 DPA10105-DPB10101 DPA10105-DPB10401 DPA10105-DPB11801 DPA10105-DPB15001 DPA10106-DPB10101 DPA10201-DPB10101 DPA10201-DPB10201 DPA10201-DPB10202 DPA10201-DPB10401 DPA10201-DPB10501 DPA10201-DPB110601 DPA10201-DPB11501 DPA10201-DPB11601 DPA10201-DPB11901 DPA10201-DPB13401 DPA10201-DPB15501 DPA10202-DPB10101 DPA10202-DPB10201 DPA10202-DPB10202 DPA10202-DPB10401 DPA10202-DPB10501 DPA10202-DPB110601 DPA10202-DPB11101 DPA10202-DPB11301 DPA10202-DPB11801 DPA10202-DPB11901 DPA10202-DPB13101 DPA10202-DPB13801; note = HLAs: DPA10202-DPB15501 DPA10202-DPB16501 DPA10301-DPB10101 DPA10301-DPB10201 DPA10301-DPB10202 DPA10301-DPB10401 DPA10301-DPB10402 DPA10301-DPB110501 DPA10301-DPB110601 DPA10301-DPB11101 DPA10301-DPB11301 DPA10301-DPB11801 DPA10301-DPB12301 DPA10301-DPB13901 DPA10301-DPB14001 DPA10301-DPB14901 DPA10301-DPB15501 DPA10301-DPB16501 DPA10301-DPB17501 DPA10301-DPB18001 DPA10401-DPB10101 DPA10401-DPB10201 DPA10401-DPB10202 DPA10401-DPB10402 DPA10401-DPB10501 DPA10401-DPB110501 DPA10401-DPB14901
KEPPFLWAGYELMPDKWTVQ

SEQ ID NO: 6558 - protein, 20 aa, synthetic construct
  source 1..20: note = Seed: KEPPFLWMGYELHPDKWTVQ; note = HLAs: DRB1_0101 DPA10103-DPB10101 DPA10103-DPB10201 DPA10103-DPB10202 DPA10103-DPB10401 DPA10103-DPB10402 DPA10103-DPB10501 DPA10103-DPB110501 DPA10103-DPB112601 DPA10103-DPB11501 DPA10103-DPB11601 DPA10103-DPB11801 DPA10103-DPB11901 DPA10103-DPB12301 DPA10103-DPB13101 DPA10103-DPB13401 DPA10103-DPB13901 DPA10103-DPB14001 DPA10103-DPB14101 DPA10103-DPB14801 DPA10103-DPB14901 DPA10103-DPB15001 DPA10103-DPB15101 DPA10103-DPB15501 DPA10103-DPB15901 DPA10103-DPB18001 DPA10104-DPB10101 DPA10104-DPB11501 DPA10105-DPB10101 DPA10105-DPB10401 DPA10105-DPB11801 DPA10105-DPB15001 DPA10106-DPB10101 DPA10201-DPB10101 DPA10201-DPB10201 DPA10201-DPB10202 DPA10201-DPB10401 DPA10201-DPB10501 DPA10201-DPB110601 DPA10201-DPB11501 DPA10201-DPB11601 DPA10201-DPB11901 DPA10201-DPB13401 DPA10201-DPB15501 DPA10202-DPB10101 DPA10202-DPB10201 DPA10202-DPB10202 DPA10202-DPB10401 DPA10202-DPB10501 DPA10202-DPB110601 DPA10202-DPB11101 DPA10202-DPB11301 DPA10202-DPB11801 DPA10202-DPB11901 DPA10202-DPB13101; note = HLAs: DPA10202-DPB13801 DPA10202-DPB15501 DPA10202-DPB16501 DPA10301-DPB10101 DPA10301-DPB10201 DPA10301-DPB10202 DPA10301-DPB10401 DPA10301-DPB10402 DPA10301-DPB110501 DPA10301-DPB110601 DPA10301-DPB11101 DPA10301-DPB11301 DPA10301-DPB11801 DPA10301-DPB12301 DPA10301-DPB13901 DPA10301-DPB14001 DPA10301-DPB14901 DPA10301-DPB15501 DPA10301-DPB16501 DPA10301-DPB17501 DPA10301-DPB18001 DPA10401-DPB10101 DPA10401-DPB10201 DPA10401-DPB10202 DPA10401-DPB10402 DPA10401-DPB10501 DPA10401-DPB110501 DPA10401-DPB14901
KEPPFLWEGWELVPDKWTVQ

SEQ ID NO: 6559 - protein, 20 aa, synthetic construct
  source 1..20: note = Seed: KEPPFLWMGYELHPDKWTVQ; note = HLAs: DPA10103-DPB10101 DPA10103-DPB10201 DPA10103-DPB10202 DPA10103-DPB10401 DPA10103-DPB10402 DPA10103-DPB10501 DPA10103-DPB110501 DPA10103-DPB112601 DPA10103-DPB11501 DPA10103-DPB11601 DPA10103-DPB11801 DPA10103-DPB11901 DPA10103-DPB12301 DPA10103-DPB13101 DPA10103-DPB13401 DPA10103-DPB13901 DPA10103-DPB14001 DPA10103-DPB14101 DPA10103-DPB14801 DPA10103-DPB14901 DPA10103-DPB15001 DPA10103-DPB15101 DPA10103-DPB15501 DPA10103-DPB15901 DPA10103-DPB18001 DPA10104-DPB10101 DPA10104-DPB11501 DPA10105-DPB10101 DPA10105-DPB10401 DPA10105-DPB11801 DPA10105-DPB15001 DPA10106-DPB10101 DPA10201-DPB10101 DPA10201-DPB10201 DPA10201-DPB10202 DPA10201-DPB10401 DPA10201-DPB10501 DPA10201-DPB110601 DPA10201-DPB11501 DPA10201-DPB11601 DPA10201-DPB11901 DPA10201-DPB13401 DPA10201-DPB15501 DPA10202-DPB10101 DPA10202-DPB10201 DPA10202-DPB10202 DPA10202-DPB10401 DPA10202-DPB10501 DPA10202-DPB110601 DPA10202-DPB11101 DPA10202-DPB11301 DPA10202-DPB11801 DPA10202-DPB11901 DPA10202-DPB13101 DPA10202-DPB13801; note = HLAs: DPA10202-DPB15501 DPA10202-DPB16501 DPA10301-DPB10101 DPA10301-DPB10201 DPA10301-DPB10202 DPA10301-DPB10401 DPA10301-DPB10402 DPA10301-DPB110501 DPA10301-DPB110601 DPA10301-DPB11101 DPA10301-DPB11301 DPA10301-DPB11801 DPA10301-DPB12301 DPA10301-DPB13901 DPA10301-DPB14001 DPA10301-DPB14901 DPA10301-DPB15501 DPA10301-DPB16501 DPA10301-DPB17501 DPA10301-DPB18001 DPA10401-DPB10101 DPA10401-DPB10201 DPA10401-DPB10202 DPA10401-DPB10402 DPA10401-DPB10501 DPA10401-DPB110501 DPA10401-DPB14901
KEPPILWNGFELLPDKWTVQ

SEQ ID NO: 6560 - protein, 20 aa, synthetic construct
  source 1..20: note = Seed: KEPPFLWMGYELHPDKWTVQ; note = HLAs: DPA10103-DPB10101 DPA10103-DPB10201 DPA10103-DPB10202 DPA10103-DPB10401 DPA10103-DPB10402 DPA10103-DPB10501 DPA10103-DPB110501 DPA10103-DPB112601 DPA10103-DPB11501 DPA10103-DPB11601 DPA10103-DPB11801 DPA10103-DPB11901 DPA10103-DPB12301 DPA10103-DPB13101 DPA10103-DPB13401 DPA10103-DPB13901 DPA10103-DPB14001 DPA10103-DPB14101 DPA10103-DPB14801 DPA10103-DPB14901 DPA10103-DPB15001 DPA10103-DPB15101 DPA10103-DPB15501 DPA10103-DPB15901 DPA10103-DPB18001 DPA10104-DPB10101 DPA10104-DPB11501 DPA10105-DPB10101 DPA10105-DPB10401 DPA10105-DPB11801 DPA10105-DPB15001 DPA10106-DPB10101 DPA10201-DPB10101 DPA10201-DPB10201 DPA10201-DPB10202 DPA10201-DPB10401 DPA10201-DPB10501 DPA10201-DPB110601 DPA10201-DPB11501 DPA10201-DPB11601 DPA10201-DPB11901 DPA10201-DPB13401 DPA10201-DPB15501 DPA10202-DPB10101 DPA10202-DPB10201 DPA10202-DPB10202 DPA10202-DPB10401 DPA10202-DPB10501 DPA10202-DPB110601 DPA10202-DPB11101 DPA10202-DPB11301 DPA10202-DPB11801 DPA10202-DPB11901 DPA10202-DPB13101 DPA10202-DPB13801; note = HLAs: DPA10202-DPB15501 DPA10202-DPB16501 DPA10301-DPB10101 DPA10301-DPB10201 DPA10301-DPB10202 DPA10301-DPB10401 DPA10301-DPB10402 DPA10301-DPB110501 DPA10301-DPB110601 DPA10301-DPB11101 DPA10301-DPB11301 DPA10301-DPB11801 DPA10301-DPB12301 DPA10301-DPB13901 DPA10301-DPB14001 DPA10301-DPB14901 DPA10301-DPB15501 DPA10301-DPB16501 DPA10301-DPB17501 DPA10301-DPB18001 DPA10401-DPB10101 DPA10401-DPB10201 DPA10401-DPB10202 DPA10401-DPB10402 DPA10401-DPB10501 DPA10401-DPB110501 DPA10401-DPB14901
KEPPFLWQGFELYPDKWTVQ

SEQ ID NO: 6561 - protein, 20 aa, synthetic construct
  source 1..20: note = Seed: KEPPFLWMGYELHPDKWTVQ; note = HLAs: DRB1_0101 DPA10103-DPB10101 DPA10103-DPB10201 DPA10103-DPB10202 DPA10103-DPB10401 DPA10103-DPB10402 DPA10103-DPB10501 DPA10103-DPB110501 DPA10103-DPB112601 DPA10103-DPB11501 DPA10103-DPB11601 DPA10103-DPB11801 DPA10103-DPB11901 DPA10103-DPB12301 DPA10103-DPB13101 DPA10103-DPB13401 DPA10103-DPB13901 DPA10103-DPB14001 DPA10103-DPB14101 DPA10103-DPB14801 DPA10103-DPB14901 DPA10103-DPB15001 DPA10103-DPB15101 DPA10103-DPB15501 DPA10103-DPB15901 DPA10103-DPB18001 DPA10104-DPB10101 DPA10104-DPB11501 DPA10105-DPB10101 DPA10105-DPB10401 DPA10105-DPB11801 DPA10105-DPB15001 DPA10106-DPB10101 DPA10201-DPB10101 DPA10201-DPB10201 DPA10201-DPB10202 DPA10201-DPB10401 DPA10201-DPB10501 DPA10201-DPB110601 DPA10201-DPB11501 DPA10201-DPB11601 DPA10201-DPB11901 DPA10201-DPB13401 DPA10201-DPB15501 DPA10202-DPB10101 DPA10202-DPB10201 DPA10202-DPB10202 DPA10202-DPB10401 DPA10202-DPB10501 DPA10202-DPB110601 DPA10202-DPB11101 DPA10202-DPB11301 DPA10202-DPB11801 DPA10202-DPB11901 DPA10202-DPB13101; note = HLAs: DPA10202-DPB13801 DPA10202-DPB15501 DPA10202-DPB16501 DPA10301-DPB10101 DPA10301-DPB10201 DPA10301-DPB10202 DPA10301-DPB10401 DPA10301-DPB10402 DPA10301-DPB110501 DPA10301-DPB110601 DPA10301-DPB11101 DPA10301-DPB11301 DPA10301-DPB11801 DPA10301-DPB12301 DPA10301-DPB13901 DPA10301-DPB14001 DPA10301-DPB14901 DPA10301-DPB15501 DPA10301-DPB16501 DPA10301-DPB17501 DPA10301-DPB18001 DPA10401-DPB10101 DPA10401-DPB10201 DPA10401-DPB10202 DPA10401-DPB10402 DPA10401-DPB10501 DPA10401-DPB110501 DPA10401-DPB14901
KEPPFLWHGWELIPDKWTVQ

SEQ ID NO: 6562 - protein, 14 aa, synthetic construct
  source 1..14: note = Seed: PPFLWMGYELHPDK; note = HLAs: DPA10103-DPB10101 DPA10103-DPB10201 DPA10103-DPB10202 DPA10103-DPB10401 DPA10103-DPB112601 DPA10103-DPB11501 DPA10103-DPB11601 DPA10103-DPB11901 DPA10103-DPB12301 DPA10103-DPB13101 DPA10103-DPB13401 DPA10103-DPB13901 DPA10103-DPB14001 DPA10103-DPB14101 DPA10103-DPB14801 DPA10103-DPB15001 DPA10103-DPB15901 DPA10104-DPB10101 DPA10104-DPB11501 DPA10105-DPB10101 DPA10105-DPB10401 DPA10105-DPB15001 DPA10106-DPB10101 DPA10201-DPB10101 DPA10201-DPB110601 DPA10201-DPB11501 DPA10201-DPB11601 DPA10201-DPB11901 DPA10202-DPB10101 DPA10202-DPB10201 DPA10202-DPB10202 DPA10202-DPB10401 DPA10202-DPB110601 DPA10202-DPB11901 DPA10202-DPB13101 DPA10202-DPB16501 DPA10301-DPB10101 DPA10301-DPB10201 DPA10301-DPB10202 DPA10301-DPB10401 DPA10301-DPB10402 DPA10301-DPB110501 DPA10301-DPB110601 DPA10301-DPB11801 DPA10301-DPB12301 DPA10301-DPB13901 DPA10301-DPB14001 DPA10301-DPB14901 DPA10301-DPB15501 DPA10301-DPB16501 DPA10301-DPB17501 DPA10301-DPB18001 DPA10401-DPB10101 DPA10401-DPB10201; note = HLAs: DPA10401-DPB10202 DPA10401-DPB10402 DPA10401-DPB10501 DPA10401-DPB110501 DPA10401-DPB14901
PPLLWNGFELIPDK

SEQ ID NO: 6563 - protein, 20 aa, synthetic construct
  source 1..20: note = Seed: KEPPFLWMGYELHPDKWTVQ; note = HLAs: DRB1_0101 DPA10103-DPB10101 DPA10103-DPB10201 DPA10103-DPB10202 DPA10103-DPB10401 DPA10103-DPB10402 DPA10103-DPB10501 DPA10103-DPB110501 DPA10103-DPB112601 DPA10103-DPB11501 DPA10103-DPB11601 DPA10103-DPB11801 DPA10103-DPB11901 DPA10103-DPB12301 DPA10103-DPB13101 DPA10103-DPB13401 DPA10103-DPB13901 DPA10103-DPB14001 DPA10103-DPB14101 DPA10103-DPB14801 DPA10103-DPB14901 DPA10103-DPB15001 DPA10103-DPB15101 DPA10103-DPB15501 DPA10103-DPB15901 DPA10103-DPB18001 DPA10104-DPB10101 DPA10104-DPB11501 DPA10105-DPB10101 DPA10105-DPB10401 DPA10105-DPB11801 DPA10105-DPB15001 DPA10106-DPB10101 DPA10201-DPB10101 DPA10201-DPB10201 DPA10201-DPB10202 DPA10201-DPB10401 DPA10201-DPB10501 DPA10201-DPB110601 DPA10201-DPB11501 DPA10201-DPB11601 DPA10201-DPB11901 DPA10201-DPB13401 DPA10201-DPB15501 DPA10202-DPB10101 DPA10202-DPB10201 DPA10202-DPB10202 DPA10202-DPB10401 DPA10202-DPB10501 DPA10202-DPB110601 DPA10202-DPB11101 DPA10202-DPB11301 DPA10202-DPB11801 DPA10202-DPB11901 DPA10202-DPB13101; note = HLAs: DPA10202-DPB13801 DPA10202-DPB15501 DPA10202-DPB16501 DPA10301-DPB10101 DPA10301-DPB10201 DPA10301-DPB10202 DPA10301-DPB10401 DPA10301-DPB10402 DPA10301-DPB110501 DPA10301-DPB110601 DPA10301-DPB11101 DPA10301-DPB11301 DPA10301-DPB11801 DPA10301-DPB12301 DPA10301-DPB13901 DPA10301-DPB14001 DPA10301-DPB14901 DPA10301-DPB15501 DPA10301-DPB16501 DPA10301-DPB17501 DPA10301-DPB18001 DPA10401-DPB10101 DPA10401-DPB10201 DPA10401-DPB10202 DPA10401-DPB10402 DPA10401-DPB10501 DPA10401-DPB110501 DPA10401-DPB14901
KEPPFLWFGFELVPDKWTVQ

SEQ ID NO: 6564 - protein, 20 aa, synthetic construct
  source 1..20: note = Seed: KEPPFLWMGYELHPDKWTVQ; note = HLAs: DRB1_0101 DRB1_1001 DPA10103-DPB10101 DPA10103-DPB10201 DPA10103-DPB10202 DPA10103-DPB10401 DPA10103-DPB10402 DPA10103-DPB10501 DPA10103-DPB110501 DPA10103-DPB112601 DPA10103-DPB11501 DPA10103-DPB11601 DPA10103-DPB11801 DPA10103-DPB11901 DPA10103-DPB12301 DPA10103-DPB13101 DPA10103-DPB13401 DPA10103-DPB13901 DPA10103-DPB14001 DPA10103-DPB14101 DPA10103-DPB14801 DPA10103-DPB14901 DPA10103-DPB15001 DPA10103-DPB15101 DPA10103-DPB15501 DPA10103-DPB15901 DPA10103-DPB18001 DPA10104-DPB10101 DPA10104-DPB11501 DPA10105-DPB10101 DPA10105-DPB10401 DPA10105-DPB11801 DPA10105-DPB15001 DPA10106-DPB10101 DPA10201-DPB10101 DPA10201-DPB10201 DPA10201-DPB10202 DPA10201-DPB10401 DPA10201-DPB10501 DPA10201-DPB110601 DPA10201-DPB11501 DPA10201-DPB11601 DPA10201-DPB11901 DPA10201-DPB13401 DPA10201-DPB15501 DPA10202-DPB10101 DPA10202-DPB10201 DPA10202-DPB10202 DPA10202-DPB10401 DPA10202-DPB10501 DPA10202-DPB110601 DPA10202-DPB11101 DPA10202-DPB11301 DPA10202-DPB11801 DPA10202-DPB11901; note = HLAs: DPA10202-DPB13101 DPA10202-DPB13801 DPA10202-DPB15501 DPA10202-DPB16501 DPA10301-DPB10101 DPA10301-DPB10201 DPA10301-DPB10202 DPA10301-DPB10401 DPA10301-DPB10402 DPA10301-DPB110501 DPA10301-DPB110601 DPA10301-DPB11101 DPA10301-DPB11301 DPA10301-DPB11801 DPA10301-DPB12301 DPA10301-DPB13901 DPA10301-DPB14001 DPA10301-DPB14901 DPA10301-DPB15501 DPA10301-DPB16501 DPA10301-DPB17501 DPA10301-DPB18001 DPA10401-DPB10101 DPA10401-DPB10201 DPA10401-DPB10202 DPA10401-DPB10402 DPA10401-DPB10501 DPA10401-DPB110501 DPA10401-DPB14901
KEPPYLWSGFELTPDKWTVQ

SEQ ID NO: 6565 - protein, 14 aa, synthetic construct
  source 1..14: note = Seed: PPFLWMGYELHPDK; note = HLAs: DPA10103-DPB10101 DPA10103-DPB10201 DPA10103-DPB10202 DPA10103-DPB10401 DPA10103-DPB112601 DPA10103-DPB11501 DPA10103-DPB11601 DPA10103-DPB11901 DPA10103-DPB12301 DPA10103-DPB13101 DPA10103-DPB13401 DPA10103-DPB13901 DPA10103-DPB14001 DPA10103-DPB14101 DPA10103-DPB14801 DPA10103-DPB15001 DPA10103-DPB15901 DPA10104-DPB10101 DPA10104-DPB11501 DPA10105-DPB10101 DPA10105-DPB10401 DPA10105-DPB15001 DPA10106-DPB10101 DPA10201-DPB10101 DPA10201-DPB110601 DPA10201-DPB11501 DPA10201-DPB11601 DPA10201-DPB11901 DPA10202-DPB10101 DPA10202-DPB10201 DPA10202-DPB10202 DPA10202-DPB10401 DPA10202-DPB110601 DPA10202-DPB11901 DPA10202-DPB13101 DPA10202-DPB16501 DPA10301-DPB10101 DPA10301-DPB10201 DPA10301-DPB10202 DPA10301-DPB10401 DPA10301-DPB10402 DPA10301-DPB110501 DPA10301-DPB110601 DPA10301-DPB11801 DPA10301-DPB12301 DPA10301-DPB13901 DPA10301-DPB14001 DPA10301-DPB14901 DPA10301-DPB15501 DPA10301-DPB16501 DPA10301-DPB17501 DPA10301-DPB18001 DPA10401-DPB10101 DPA10401-DPB10201; note = HLAs: DPA10401-DPB10202 DPA10401-DPB10402 DPA10401-DPB10501 DPA10401-DPB110501 DPA10401-DPB14901
PPFLWHGLELIPDK

SEQ ID NO: 6566 - protein, 20 aa, synthetic construct
  source 1..20: note = Seed: KEPPFLWMGYELHPDKWTVQ; note = HLAs: DPA10103-DPB10101 DPA10103-DPB10201 DPA10103-DPB10202 DPA10103-DPB10401 DPA10103-DPB10402 DPA10103-DPB10501 DPA10103-DPB110501 DPA10103-DPB112601 DPA10103-DPB11501 DPA10103-DPB11601 DPA10103-DPB11801 DPA10103-DPB11901 DPA10103-DPB12301 DPA10103-DPB13101 DPA10103-DPB13401 DPA10103-DPB13901 DPA10103-DPB14001 DPA10103-DPB14101 DPA10103-DPB14801 DPA10103-DPB14901 DPA10103-DPB15001 DPA10103-DPB15101 DPA10103-DPB15501 DPA10103-DPB15901 DPA10103-DPB18001 DPA10104-DPB10101 DPA10104-DPB11501 DPA10105-DPB10101 DPA10105-DPB10401 DPA10105-DPB11801 DPA10105-DPB15001 DPA10106-DPB10101 DPA10201-DPB10101 DPA10201-DPB10201 DPA10201-DPB10202 DPA10201-DPB10401 DPA10201-DPB10501 DPA10201-DPB110601 DPA10201-DPB11501 DPA10201-DPB11601 DPA10201-DPB11901 DPA10201-DPB13401 DPA10201-DPB15501 DPA10202-DPB10101 DPA10202-DPB10201 DPA10202-DPB10202 DPA10202-DPB10401 DPA10202-DPB10501 DPA10202-DPB110601 DPA10202-DPB11101 DPA10202-DPB11301 DPA10202-DPB11801 DPA10202-DPB11901 DPA10202-DPB13101 DPA10202-DPB13801; note = HLAs: DPA10202-DPB15501 DPA10202-DPB16501 DPA10301-DPB10101 DPA10301-DPB10201 DPA10301-DPB10202 DPA10301-DPB10401 DPA10301-DPB10402 DPA10301-DPB110501 DPA10301-DPB110601 DPA10301-DPB11101 DPA10301-DPB11301 DPA10301-DPB11801 DPA10301-DPB12301 DPA10301-DPB13901 DPA10301-DPB14001 DPA10301-DPB14901 DPA10301-DPB15501 DPA10301-DPB16501 DPA10301-DPB17501 DPA10301-DPB18001 DPA10401-DPB10101 DPA10401-DPB10201 DPA10401-DPB10202 DPA10401-DPB10402 DPA10401-DPB10501 DPA10401-DPB110501 DPA10401-DPB14901
KEPPLLWNGFELIPDKWTVQ

SEQ ID NO: 6567 - protein, 14 aa, synthetic construct
  source 1..14: note = Seed: PPFLWMGYELHPDK; note = HLAs: DPA10103-DPB10101 DPA10103-DPB10201 DPA10103-DPB10202 DPA10103-DPB10401 DPA10103-DPB112601 DPA10103-DPB11501 DPA10103-DPB11601 DPA10103-DPB11901 DPA10103-DPB12301 DPA10103-DPB13101 DPA10103-DPB13401 DPA10103-DPB13901 DPA10103-DPB14001 DPA10103-DPB14101 DPA10103-DPB14801 DPA10103-DPB15001 DPA10103-DPB15901 DPA10104-DPB10101 DPA10104-DPB11501 DPA10105-DPB10101 DPA10105-DPB10401 DPA10105-DPB15001 DPA10106-DPB10101 DPA10201-DPB10101 DPA10201-DPB110601 DPA10201-DPB11501 DPA10201-DPB11601 DPA10201-DPB11901 DPA10202-DPB10101 DPA10202-DPB10201 DPA10202-DPB10202 DPA10202-DPB10401 DPA10202-DPB110601 DPA10202-DPB11901 DPA10202-DPB13101 DPA10202-DPB16501 DPA10301-DPB10101 DPA10301-DPB10201 DPA10301-DPB10202 DPA10301-DPB10401 DPA10301-DPB10402 DPA10301-DPB110501 DPA10301-DPB110601 DPA10301-DPB11801 DPA10301-DPB12301 DPA10301-DPB13901 DPA10301-DPB14001 DPA10301-DPB14901 DPA10301-DPB15501 DPA10301-DPB16501 DPA10301-DPB17501 DPA10301-DPB18001 DPA10401-DPB10101 DPA10401-DPB10201; note = HLAs: DPA10401-DPB10202 DPA10401-DPB10402 DPA10401-DPB10501 DPA10401-DPB110501 DPA10401-DPB14901
PPYLWKGFELLPDK

SEQ ID NO: 6568 - protein, 14 aa, synthetic construct
  source 1..14: note = Seed: PPFLWMGYELHPDK; note = HLAs: DPA10103-DPB10101 DPA10103-DPB10201 DPA10103-DPB10202 DPA10103-DPB10401 DPA10103-DPB112601 DPA10103-DPB11501 DPA10103-DPB11601 DPA10103-DPB11901 DPA10103-DPB12301 DPA10103-DPB13101 DPA10103-DPB13401 DPA10103-DPB13901 DPA10103-DPB14001 DPA10103-DPB14101 DPA10103-DPB14801 DPA10103-DPB15001 DPA10103-DPB15901 DPA10104-DPB10101 DPA10104-DPB11501 DPA10105-DPB10101 DPA10105-DPB10401 DPA10105-DPB15001 DPA10106-DPB10101 DPA10201-DPB10101 DPA10201-DPB110601 DPA10201-DPB11501 DPA10201-DPB11601 DPA10201-DPB11901 DPA10202-DPB10101 DPA10202-DPB10201 DPA10202-DPB10202 DPA10202-DPB10401 DPA10202-DPB110601 DPA10202-DPB11901 DPA10202-DPB13101 DPA10202-DPB16501 DPA10301-DPB10101 DPA10301-DPB10201 DPA10301-DPB10202 DPA10301-DPB10401 DPA10301-DPB10402 DPA10301-DPB110501 DPA10301-DPB110601 DPA10301-DPB11801 DPA10301-DPB12301 DPA10301-DPB13901 DPA10301-DPB14001 DPA10301-DPB14901 DPA10301-DPB15501 DPA10301-DPB16501 DPA10301-DPB17501 DPA10301-DPB18001 DPA10401-DPB10101 DPA10401-DPB10201; note = HLAs: DPA10401-DPB10202 DPA10401-DPB10402 DPA10401-DPB10501 DPA10401-DPB110501 DPA10401-DPB14901
PPFLWSGFELDPDK

SEQ ID NO: 6569 - protein, 14 aa, synthetic construct
  source 1..14: note = Seed: PPFLWMGYELHPDK; note = HLAs: DRB1_1001 DPA10103-DPB10101 DPA10103-DPB10201 DPA10103-DPB10202 DPA10103-DPB10401 DPA10103-DPB112601 DPA10103-DPB11501 DPA10103-DPB11601 DPA10103-DPB11901 DPA10103-DPB12301 DPA10103-DPB13101 DPA10103-DPB13401 DPA10103-DPB13901 DPA10103-DPB14001 DPA10103-DPB14101 DPA10103-DPB14801 DPA10103-DPB15001 DPA10103-DPB15901 DPA10104-DPB10101 DPA10104-DPB11501 DPA10105-DPB10101 DPA10105-DPB10401 DPA10105-DPB15001 DPA10106-DPB10101 DPA10201-DPB10101 DPA10201-DPB110601 DPA10201-DPB11501 DPA10201-DPB11601 DPA10201-DPB11901 DPA10202-DPB10101 DPA10202-DPB10201 DPA10202-DPB10202 DPA10202-DPB10401 DPA10202-DPB110601 DPA10202-DPB11901 DPA10202-DPB13101 DPA10202-DPB16501 DPA10301-DPB10101 DPA10301-DPB10201 DPA10301-DPB10202 DPA10301-DPB10401 DPA10301-DPB10402 DPA10301-DPB110501 DPA10301-DPB110601 DPA10301-DPB11801 DPA10301-DPB12301 DPA10301-DPB13901 DPA10301-DPB14001 DPA10301-DPB14901 DPA10301-DPB15501 DPA10301-DPB16501 DPA10301-DPB17501 DPA10301-DPB18001 DPA10401-DPB10101 DPA10401-DPB10201; note = HLAs: DPA10401-DPB10202 DPA10401-DPB10402 DPA10401-DPB10501 DPA10401-DPB110501 DPA10401-DPB14901
PPYLWSGFELAPDK

SEQ ID NO: 6570 - protein, 20 aa, synthetic construct
  source 1..20: note = Seed: KEPPFLWMGYELHPDKWTVQ; note = HLAs: DPA10103-DPB10101 DPA10103-DPB10201 DPA10103-DPB10202 DPA10103-DPB10401 DPA10103-DPB10402 DPA10103-DPB10501 DPA10103-DPB110501 DPA10103-DPB112601 DPA10103-DPB11501 DPA10103-DPB11601 DPA10103-DPB11801 DPA10103-DPB11901 DPA10103-DPB12301 DPA10103-DPB13101 DPA10103-DPB13401 DPA10103-DPB13901 DPA10103-DPB14001 DPA10103-DPB14101 DPA10103-DPB14801 DPA10103-DPB14901 DPA10103-DPB15001 DPA10103-DPB15101 DPA10103-DPB15501 DPA10103-DPB15901 DPA10103-DPB18001 DPA10104-DPB10101 DPA10104-DPB11501 DPA10105-DPB10101 DPA10105-DPB10401 DPA10105-DPB11801 DPA10105-DPB15001 DPA10106-DPB10101 DPA10201-DPB10101 DPA10201-DPB10201 DPA10201-DPB10202 DPA10201-DPB10401 DPA10201-DPB10501 DPA10201-DPB110601 DPA10201-DPB11501 DPA10201-DPB11601 DPA10201-DPB11901 DPA10201-DPB13401 DPA10201-DPB15501 DPA10202-DPB10101 DPA10202-DPB10201 DPA10202-DPB10202 DPA10202-DPB10401 DPA10202-DPB10501 DPA10202-DPB110601 DPA10202-DPB11101 DPA10202-DPB11301 DPA10202-DPB11801 DPA10202-DPB11901 DPA10202-DPB13101 DPA10202-DPB13801; note = HLAs: DPA10202-DPB15501 DPA10202-DPB16501 DPA10301-DPB10101 DPA10301-DPB10201 DPA10301-DPB10202 DPA10301-DPB10401 DPA10301-DPB10402 DPA10301-DPB110501 DPA10301-DPB110601 DPA10301-DPB11101 DPA10301-DPB11301 DPA10301-DPB11801 DPA10301-DPB12301 DPA10301-DPB13901 DPA10301-DPB14001 DPA10301-DPB14901 DPA10301-DPB15501 DPA10301-DPB16501 DPA10301-DPB17501 DPA10301-DPB18001 DPA10401-DPB10101 DPA10401-DPB10201 DPA10401-DPB10202 DPA10401-DPB10402 DPA10401-DPB10501 DPA10401-DPB110501 DPA10401-DPB14901
KEPPFLWHGFELNPDKWTVQ

SEQ ID NO: 6571 - protein, 20 aa, synthetic construct
  source 1..20: note = Seed: KEPPFLWMGYELHPDKWTVQ; note = HLAs: DRB1_0101 DPA10103-DPB10101 DPA10103-DPB10201 DPA10103-DPB10202 DPA10103-DPB10401 DPA10103-DPB10402 DPA10103-DPB10501 DPA10103-DPB110501 DPA10103-DPB112601 DPA10103-DPB11501 DPA10103-DPB11601 DPA10103-DPB11801 DPA10103-DPB11901 DPA10103-DPB12301 DPA10103-DPB13101 DPA10103-DPB13401 DPA10103-DPB13901 DPA10103-DPB14001 DPA10103-DPB14101 DPA10103-DPB14801 DPA10103-DPB14901 DPA10103-DPB15001 DPA10103-DPB15101 DPA10103-DPB15501 DPA10103-DPB15901 DPA10103-DPB18001 DPA10104-DPB10101 DPA10104-DPB11501 DPA10105-DPB10101 DPA10105-DPB10401 DPA10105-DPB11801 DPA10105-DPB15001 DPA10106-DPB10101 DPA10201-DPB10101 DPA10201-DPB10201 DPA10201-DPB10202 DPA10201-DPB10401 DPA10201-DPB10501 DPA10201-DPB110601 DPA10201-DPB11501 DPA10201-DPB11601 DPA10201-DPB11901 DPA10201-DPB13401 DPA10201-DPB15501 DPA10202-DPB10101 DPA10202-DPB10201 DPA10202-DPB10202 DPA10202-DPB10401 DPA10202-DPB10501 DPA10202-DPB110601 DPA10202-DPB11101 DPA10202-DPB11301 DPA10202-DPB11801 DPA10202-DPB11901 DPA10202-DPB13101; note = HLAs: DPA10202-DPB13801 DPA10202-DPB15501 DPA10202-DPB16501 DPA10301-DPB10101 DPA10301-DPB10201 DPA10301-DPB10202 DPA10301-DPB10401 DPA10301-DPB10402 DPA10301-DPB110501 DPA10301-DPB110601 DPA10301-DPB11301 DPA10301-DPB11801 DPA10301-DPB12301 DPA10301-DPB13901 DPA10301-DPB14001 DPA10301-DPB14901 DPA10301-DPB15501 DPA10301-DPB16501 DPA10301-DPB17501 DPA10301-DPB18001 DPA10401-DPB10101 DPA10401-DPB10201 DPA10401-DPB10202 DPA10401-DPB10402 DPA10401-DPB10501 DPA10401-DPB110501 DPA10401-DPB14901
KEPPFLWRGFELVPDKWTVQ

SEQ ID NO: 6572 - protein, 14 aa, synthetic construct
  source 1..14: note = Seed: PPFLWMGYELHPDK; note = HLAs: DRB1_1001 DPA10103-DPB10101 DPA10103-DPB10201 DPA10103-DPB10202 DPA10103-DPB10401 DPA10103-DPB112601 DPA10103-DPB11501 DPA10103-DPB11601 DPA10103-DPB11901 DPA10103-DPB12301 DPA10103-DPB13101 DPA10103-DPB13401 DPA10103-DPB13901 DPA10103-DPB14001 DPA10103-DPB14101 DPA10103-DPB14801 DPA10103-DPB15001 DPA10103-DPB15901 DPA10104-DPB10101 DPA10104-DPB11501 DPA10105-DPB10101 DPA10105-DPB10401 DPA10105-DPB15001 DPA10106-DPB10101 DPA10201-DPB10101 DPA10201-DPB110601 DPA10201-DPB11501 DPA10201-DPB11601 DPA10201-DPB11901 DPA10202-DPB10101 DPA10202-DPB10201 DPA10202-DPB10202 DPA10202-DPB10401 DPA10202-DPB110601 DPA10202-DPB11901 DPA10202-DPB13101 DPA10202-DPB16501 DPA10301-DPB10101 DPA10301-DPB10201 DPA10301-DPB10202 DPA10301-DPB10401 DPA10301-DPB10402 DPA10301-DPB110501 DPA10301-DPB110601 DPA10301-DPB11801 DPA10301-DPB12301 DPA10301-DPB13901 DPA10301-DPB14001 DPA10301-DPB14901 DPA10301-DPB15501 DPA10301-DPB16501 DPA10301-DPB17501 DPA10301-DPB18001 DPA10401-DPB10101 DPA10401-DPB10201; note = HLAs: DPA10401-DPB10202 DPA10401-DPB10402 DPA10401-DPB10501 DPA10401-DPB110501 DPA10401-DPB14901
PPFLWIGFELDPDK

SEQ ID NO: 6573 - protein, 14 aa, synthetic construct
  source 1..14: note = Seed: PPFLWMGYELHPDK; note = HLAs: DPA10103-DPB10101 DPA10103-DPB10201 DPA10103-DPB10202 DPA10103-DPB10401 DPA10103-DPB112601 DPA10103-DPB11501 DPA10103-DPB11601 DPA10103-DPB11901 DPA10103-DPB12301 DPA10103-DPB13101 DPA10103-DPB13401 DPA10103-DPB13901 DPA10103-DPB14001 DPA10103-DPB14101 DPA10103-DPB14801 DPA10103-DPB15001 DPA10103-DPB15901 DPA10104-DPB10101 DPA10104-DPB11501 DPA10105-DPB10101 DPA10105-DPB10401 DPA10105-DPB15001 DPA10106-DPB10101 DPA10201-DPB10101 DPA10201-DPB110601 DPA10201-DPB11501 DPA10201-DPB11601 DPA10201-DPB11901 DPA10202-DPB10101 DPA10202-DPB10201 DPA10202-DPB10202 DPA10202-DPB10401 DPA10202-DPB110601 DPA10202-DPB11901 DPA10202-DPB13101 DPA10202-DPB16501 DPA10301-DPB10101 DPA10301-DPB10201 DPA10301-DPB10202 DPA10301-DPB10401 DPA10301-DPB10402 DPA10301-DPB110501 DPA10301-DPB110601 DPA10301-DPB11801 DPA10301-DPB12301 DPA10301-DPB13901 DPA10301-DPB14001 DPA10301-DPB14901 DPA10301-DPB15501 DPA10301-DPB16501 DPA10301-DPB17501 DPA10301-DPB18001 DPA10401-DPB10101 DPA10401-DPB10201; note = HLAs: DPA10401-DPB10202 DPA10401-DPB10402 DPA10401-DPB10501 DPA10401-DPB110501 DPA10401-DPB14901
PPLLWAGFELFPDK

SEQ ID NO: 6574 - protein, 20 aa, synthetic construct
  source 1..20: note = Seed: KEPPFLWMGYELHPDKWTVQ; note = HLAs: DPA10103-DPB10101 DPA10103-DPB10201 DPA10103-DPB10202 DPA10103-DPB10401 DPA10103-DPB10402 DPA10103-DPB10501 DPA10103-DPB110501 DPA10103-DPB112601 DPA10103-DPB11501 DPA10103-DPB11601 DPA10103-DPB11801 DPA10103-DPB11901 DPA10103-DPB12301 DPA10103-DPB13101 DPA10103-DPB13401 DPA10103-DPB13901 DPA10103-DPB14001 DPA10103-DPB14101 DPA10103-DPB14801 DPA10103-DPB14901 DPA10103-DPB15001 DPA10103-DPB15101 DPA10103-DPB15501 DPA10103-DPB15901 DPA10103-DPB18001 DPA10104-DPB10101 DPA10104-DPB11501 DPA10105-DPB10101 DPA10105-DPB10401 DPA10105-DPB11801 DPA10105-DPB15001 DPA10106-DPB10101 DPA10201-DPB10101 DPA10201-DPB10201 DPA10201-DPB10202 DPA10201-DPB10401 DPA10201-DPB10501 DPA10201-DPB110601 DPA10201-DPB11501 DPA10201-DPB11601 DPA10201-DPB11901 DPA10201-DPB13401 DPA10201-DPB15501 DPA10202-DPB10101 DPA10202-DPB10201 DPA10202-DPB10202 DPA10202-DPB10401 DPA10202-DPB10501 DPA10202-DPB110601 DPA10202-DPB11101 DPA10202-DPB11301 DPA10202-DPB11801 DPA10202-DPB11901 DPA10202-DPB13101 DPA10202-DPB13801; note = HLAs: DPA10202-DPB15501 DPA10202-DPB16501 DPA10301-DPB10101 DPA10301-DPB10201 DPA10301-DPB10202 DPA10301-DPB10401 DPA10301-DPB10402 DPA10301-DPB110501 DPA10301-DPB110601 DPA10301-DPB11101 DPA10301-DPB11301 DPA10301-DPB11801 DPA10301-DPB12301 DPA10301-DPB13901 DPA10301-DPB14001 DPA10301-DPB14901 DPA10301-DPB15501 DPA10301-DPB16501 DPA10301-DPB17501 DPA10301-DPB18001 DPA10401-DPB10101 DPA10401-DPB10201 DPA10401-DPB10202 DPA10401-DPB10402 DPA10401-DPB10501 DPA10401-DPB110501 DPA10401-DPB14901
KEPPYLWHGFELFPDKWTVQ

SEQ ID NO: 6575 - protein, 14 aa, synthetic construct
  source 1..14: note = Seed: PPFLWMGYELHPDK; note = HLAs: DPA10103-DPB10101 DPA10103-DPB10201 DPA10103-DPB10202 DPA10103-DPB10401 DPA10103-DPB112601 DPA10103-DPB11501 DPA10103-DPB11601 DPA10103-DPB11901 DPA10103-DPB12301 DPA10103-DPB13101 DPA10103-DPB13401 DPA10103-DPB13901 DPA10103-DPB14001 DPA10103-DPB14101 DPA10103-DPB14801 DPA10103-DPB15001 DPA10103-DPB15901 DPA10104-DPB10101 DPA10104-DPB11501 DPA10105-DPB10101 DPA10105-DPB10401 DPA10105-DPB15001 DPA10106-DPB10101 DPA10201-DPB10101 DPA10201-DPB110601 DPA10201-DPB11501 DPA10201-DPB11601 DPA10201-DPB11901 DPA10202-DPB10101 DPA10202-DPB10201 DPA10202-DPB10202 DPA10202-DPB10401 DPA10202-DPB110601 DPA10202-DPB11901 DPA10202-DPB13101 DPA10202-DPB16501 DPA10301-DPB10101 DPA10301-DPB10201 DPA10301-DPB10202 DPA10301-DPB10401 DPA10301-DPB10402 DPA10301-DPB110501 DPA10301-DPB110601 DPA10301-DPB11801 DPA10301-DPB12301 DPA10301-DPB13901 DPA10301-DPB14001 DPA10301-DPB14901 DPA10301-DPB15501 DPA10301-DPB16501 DPA10301-DPB17501 DPA10301-DPB18001 DPA10401-DPB10101 DPA10401-DPB10201; note = HLAs: DPA10401-DPB10202 DPA10401-DPB10402 DPA10401-DPB10501 DPA10401-DPB110501 DPA10401-DPB14901
PPYLWHGFELMPDK

SEQ ID NO: 6576 - protein, 14 aa, synthetic construct
  source 1..14: note = Seed: PPFLWMGYELHPDK; note = HLAs: DPA10103-DPB10101 DPA10103-DPB10201 DPA10103-DPB10202 DPA10103-DPB10401 DPA10103-DPB112601 DPA10103-DPB11501 DPA10103-DPB11601 DPA10103-DPB11901 DPA10103-DPB12301 DPA10103-DPB13101 DPA10103-DPB13401 DPA10103-DPB13901 DPA10103-DPB14001 DPA10103-DPB14101 DPA10103-DPB14801 DPA10103-DPB15001 DPA10103-DPB15901 DPA10104-DPB10101 DPA10104-DPB11501 DPA10105-DPB10101 DPA10105-DPB10401 DPA10105-DPB15001 DPA10106-DPB10101 DPA10201-DPB10101 DPA10201-DPB110601 DPA10201-DPB11501 DPA10201-DPB11601 DPA10201-DPB11901 DPA10202-DPB10101 DPA10202-DPB10201 DPA10202-DPB10202 DPA10202-DPB10401 DPA10202-DPB110601 DPA10202-DPB11901 DPA10202-DPB13101 DPA10202-DPB16501 DPA10301-DPB10101 DPA10301-DPB10201 DPA10301-DPB10202 DPA10301-DPB10401 DPA10301-DPB10402 DPA10301-DPB110501 DPA10301-DPB110601 DPA10301-DPB11801 DPA10301-DPB12301 DPA10301-DPB13901 DPA10301-DPB14001 DPA10301-DPB14901 DPA10301-DPB15501 DPA10301-DPB16501 DPA10301-DPB17501 DPA10301-DPB18001 DPA10401-DPB10101 DPA10401-DPB10201; note = HLAs: DPA10401-DPB10202 DPA10401-DPB10402 DPA10401-DPB10501 DPA10401-DPB110501 DPA10401-DPB14901
PPFLWHGYELVPDK

SEQ ID NO: 6577 - protein, 20 aa, synthetic construct
  source 1..20: note = Seed: KEPPFLWMGYELHPDKWTVQ; note = HLAs: DPA10103-DPB10101 DPA10103-DPB10201 DPA10103-DPB10202 DPA10103-DPB10401 DPA10103-DPB10402 DPA10103-DPB10501 DPA10103-DPB110501 DPA10103-DPB112601 DPA10103-DPB11501 DPA10103-DPB11601 DPA10103-DPB11801 DPA10103-DPB11901 DPA10103-DPB12301 DPA10103-DPB13101 DPA10103-DPB13401 DPA10103-DPB13901 DPA10103-DPB14001 DPA10103-DPB14101 DPA10103-DPB14801 DPA10103-DPB14901 DPA10103-DPB15001 DPA10103-DPB15101 DPA10103-DPB15501 DPA10103-DPB15901 DPA10103-DPB18001 DPA10104-DPB10101 DPA10104-DPB11501 DPA10105-DPB10101 DPA10105-DPB10401 DPA10105-DPB11801 DPA10105-DPB15001 DPA10106-DPB10101 DPA10201-DPB10101 DPA10201-DPB10201 DPA10201-DPB10202 DPA10201-DPB10401 DPA10201-DPB10501 DPA10201-DPB110601 DPA10201-DPB11501 DPA10201-DPB11601 DPA10201-DPB11901 DPA10201-DPB13401 DPA10201-DPB15501 DPA10202-DPB10101 DPA10202-DPB10201 DPA10202-DPB10202 DPA10202-DPB10401 DPA10202-DPB10501 DPA10202-DPB110601 DPA10202-DPB11101 DPA10202-DPB11301 DPA10202-DPB11801 DPA10202-DPB11901 DPA10202-DPB13101 DPA10202-DPB13801; note = HLAs: DPA10202-DPB15501 DPA10202-DPB16501 DPA10301-DPB10101 DPA10301-DPB10201 DPA10301-DPB10202 DPA10301-DPB10401 DPA10301-DPB10402 DPA10301-DPB110501 DPA10301-DPB110601 DPA10301-DPB11101 DPA10301-DPB11301 DPA10301-DPB11801 DPA10301-DPB12301 DPA10301-DPB13901 DPA10301-DPB14001 DPA10301-DPB14901 DPA10301-DPB15501 DPA10301-DPB16501 DPA10301-DPB17501 DPA10301-DPB18001 DPA10401-DPB10101 DPA10401-DPB10201 DPA10401-DPB10202 DPA10401-DPB10402 DPA10401-DPB10501 DPA10401-DPB110501 DPA10401-DPB14901
KEPPFLWTGFELPPDKWTVQ

SEQ ID NO: 6578 - protein, 20 aa, synthetic construct
  source 1..20: note = Seed: KEPPFLWMGYELHPDKWTVQ; note = HLAs: DRB1_0101 DPA10103-DPB10101 DPA10103-DPB10201 DPA10103-DPB10202 DPA10103-DPB10401 DPA10103-DPB10402 DPA10103-DPB10501 DPA10103-DPB110501 DPA10103-DPB112601 DPA10103-DPB11501 DPA10103-DPB11601 DPA10103-DPB11801 DPA10103-DPB11901 DPA10103-DPB12301 DPA10103-DPB13101 DPA10103-DPB13401 DPA10103-DPB13901 DPA10103-DPB14001 DPA10103-DPB14101 DPA10103-DPB14801 DPA10103-DPB14901 DPA10103-DPB15001 DPA10103-DPB15101 DPA10103-DPB15501 DPA10103-DPB15901 DPA10103-DPB18001 DPA10104-DPB10101 DPA10104-DPB11501 DPA10105-DPB10101 DPA10105-DPB10401 DPA10105-DPB11801 DPA10105-DPB15001 DPA10106-DPB10101 DPA10201-DPB10101 DPA10201-DPB10201 DPA10201-DPB10202 DPA10201-DPB10401 DPA10201-DPB10501 DPA10201-DPB110601 DPA10201-DPB11501 DPA10201-DPB11601 DPA10201-DPB11901 DPA10201-DPB13401 DPA10201-DPB15501 DPA10202-DPB10101 DPA10202-DPB10201 DPA10202-DPB10202 DPA10202-DPB10401 DPA10202-DPB10501 DPA10202-DPB110601 DPA10202-DPB11101 DPA10202-DPB11301 DPA10202-DPB11801 DPA10202-DPB11901 DPA10202-DPB13101; note = HLAs: DPA10202-DPB13801 DPA10202-DPB15501 DPA10202-DPB16501 DPA10301-DPB10101 DPA10301-DPB10201 DPA10301-DPB10202 DPA10301-DPB10401 DPA10301-DPB10402 DPA10301-DPB110501 DPA10301-DPB110601 DPA10301-DPB11101 DPA10301-DPB11301 DPA10301-DPB11801 DPA10301-DPB12301 DPA10301-DPB13901 DPA10301-DPB14001 DPA10301-DPB14901 DPA10301-DPB15501 DPA10301-DPB16501 DPA10301-DPB17501 DPA10301-DPB18001 DPA10401-DPB10101 DPA10401-DPB10201 DPA10401-DPB10202 DPA10401-DPB10402 DPA10401-DPB10501 DPA10401-DPB110501 DPA10401-DPB14901
KEPPFLWNGFELYPDKWTVQ

SEQ ID NO: 6579 - protein, 20 aa, synthetic construct
  source 1..20: note = Seed: KEPPFLWMGYELHPDKWTVQ; note = HLAs: DRB1_0101 DPA10103-DPB10101 DPA10103-DPB10201 DPA10103-DPB10202 DPA10103-DPB10401 DPA10103-DPB10402 DPA10103-DPB10501 DPA10103-DPB110501 DPA10103-DPB112601 DPA10103-DPB11501 DPA10103-DPB11601 DPA10103-DPB11801 DPA10103-DPB11901 DPA10103-DPB12301 DPA10103-DPB13101 DPA10103-DPB13401 DPA10103-DPB13901 DPA10103-DPB14001 DPA10103-DPB14101 DPA10103-DPB14801 DPA10103-DPB14901 DPA10103-DPB15001 DPA10103-DPB15101 DPA10103-DPB15501 DPA10103-DPB15901 DPA10103-DPB18001 DPA10104-DPB10101 DPA10104-DPB11501 DPA10105-DPB10101 DPA10105-DPB10401 DPA10105-DPB11801 DPA10105-DPB15001 DPA10106-DPB10101 DPA10201-DPB10101 DPA10201-DPB10201 DPA10201-DPB10202 DPA10201-DPB10401 DPA10201-DPB10501 DPA10201-DPB110601 DPA10201-DPB11501 DPA10201-DPB11601 DPA10201-DPB11901 DPA10201-DPB13401 DPA10201-DPB15501 DPA10202-DPB10101 DPA10202-DPB10201 DPA10202-DPB10202 DPA10202-DPB10401 DPA10202-DPB10501 DPA10202-DPB110601 DPA10202-DPB11101 DPA10202-DPB11301 DPA10202-DPB11801 DPA10202-DPB11901 DPA10202-DPB13101; note = HLAs: DPA10202-DPB13801 DPA10202-DPB15501 DPA10202-DPB16501 DPA10301-DPB10101 DPA10301-DPB10201 DPA10301-DPB10202 DPA10301-DPB10401 DPA10301-DPB10402 DPA10301-DPB110501 DPA10301-DPB110601 DPA10301-DPB11101 DPA10301-DPB11301 DPA10301-DPB11801 DPA10301-DPB12301 DPA10301-DPB13901 DPA10301-DPB14001 DPA10301-DPB14901 DPA10301-DPB15501 DPA10301-DPB16501 DPA10301-DPB17501 DPA10301-DPB18001 DPA10401-DPB10101 DPA10401-DPB10201 DPA10401-DPB10202 DPA10401-DPB10402 DPA10401-DPB10501 DPA10401-DPB110501 DPA10401-DPB14901
KEPPFLWEGWELIPDKWTVQ

SEQ ID NO: 6580 - protein, 14 aa, synthetic construct
  source 1..14: note = Seed: PPFLWMGYELHPDK; note = HLAs: DPA10103-DPB10101 DPA10103-DPB10201 DPA10103-DPB10202 DPA10103-DPB10401 DPA10103-DPB112601 DPA10103-DPB11501 DPA10103-DPB11601 DPA10103-DPB11901 DPA10103-DPB12301 DPA10103-DPB13101 DPA10103-DPB13401 DPA10103-DPB13901 DPA10103-DPB14001 DPA10103-DPB14101 DPA10103-DPB14801 DPA10103-DPB15001 DPA10103-DPB15901 DPA10104-DPB10101 DPA10104-DPB11501 DPA10105-DPB10101 DPA10105-DPB10401 DPA10105-DPB15001 DPA10106-DPB10101 DPA10201-DPB10101 DPA10201-DPB110601 DPA10201-DPB11501 DPA10201-DPB11601 DPA10201-DPB11901 DPA10202-DPB10101 DPA10202-DPB10201 DPA10202-DPB10202 DPA10202-DPB10401 DPA10202-DPB110601 DPA10202-DPB11901 DPA10202-DPB13101 DPA10202-DPB16501 DPA10301-DPB10101 DPA10301-DPB10201 DPA10301-DPB10202 DPA10301-DPB10401 DPA10301-DPB10402 DPA10301-DPB110501 DPA10301-DPB110601 DPA10301-DPB11801 DPA10301-DPB12301 DPA10301-DPB13901 DPA10301-DPB14001 DPA10301-DPB14901 DPA10301-DPB15501 DPA10301-DPB16501 DPA10301-DPB17501 DPA10301-DPB18001 DPA10401-DPB10101 DPA10401-DPB10201; note = HLAs: DPA10401-DPB10202 DPA10401-DPB10402 DPA10401-DPB10501 DPA10401-DPB110501 DPA10401-DPB14901
PPLLWNGFELVPDK

SEQ ID NO: 6581 - protein, 20 aa, synthetic construct
  source 1..20: note = Seed: KEPPFLWMGYELHPDKWTVQ; note = HLAs: DRB1_0101 DPA10103-DPB10101 DPA10103-DPB10201 DPA10103-DPB10202 DPA10103-DPB10401 DPA10103-DPB10402 DPA10103-DPB10501 DPA10103-DPB110501 DPA10103-DPB112601 DPA10103-DPB11501 DPA10103-DPB11601 DPA10103-DPB11801 DPA10103-DPB11901 DPA10103-DPB12301 DPA10103-DPB13101 DPA10103-DPB13401 DPA10103-DPB13901 DPA10103-DPB14001 DPA10103-DPB14101 DPA10103-DPB14801 DPA10103-DPB14901 DPA10103-DPB15001 DPA10103-DPB15101 DPA10103-DPB15501 DPA10103-DPB15901 DPA10103-DPB18001 DPA10104-DPB10101 DPA10104-DPB11501 DPA10105-DPB10101 DPA10105-DPB10401 DPA10105-DPB11801 DPA10105-DPB15001 DPA10106-DPB10101 DPA10201-DPB10101 DPA10201-DPB10201 DPA10201-DPB10202 DPA10201-DPB10401 DPA10201-DPB10501 DPA10201-DPB110601 DPA10201-DPB11501 DPA10201-DPB11601 DPA10201-DPB11901 DPA10201-DPB13401 DPA10201-DPB15501 DPA10202-DPB10101 DPA10202-DPB10201 DPA10202-DPB10202 DPA10202-DPB10401 DPA10202-DPB10501 DPA10202-DPB110601 DPA10202-DPB11101 DPA10202-DPB11301 DPA10202-DPB11801 DPA10202-DPB11901 DPA10202-DPB13101; note = HLAs: DPA10202-DPB13801 DPA10202-DPB15501 DPA10202-DPB16501 DPA10301-DPB10101 DPA10301-DPB10201 DPA10301-DPB10202 DPA10301-DPB10401 DPA10301-DPB10402 DPA10301-DPB110501 DPA10301-DPB110601 DPA10301-DPB11101 DPA10301-DPB11301 DPA10301-DPB11801 DPA10301-DPB12301 DPA10301-DPB13901 DPA10301-DPB14001 DPA10301-DPB14901 DPA10301-DPB15501 DPA10301-DPB16501 DPA10301-DPB17501 DPA10301-DPB18001 DPA10401-DPB10101 DPA10401-DPB10201 DPA10401-DPB10202 DPA10401-DPB10402 DPA10401-DPB10501 DPA10401-DPB110501 DPA10401-DPB14901
KEPPWLWEGFELLPDKWTVQ

SEQ ID NO: 6582 - protein, 20 aa, synthetic construct
  source 1..20: note = Seed: KEPPFLWMGYELHPDKWTVQ; note = HLAs: DRB1_0101 DPA10103-DPB10101 DPA10103-DPB10201 DPA10103-DPB10202 DPA10103-DPB10401 DPA10103-DPB10402 DPA10103-DPB10501 DPA10103-DPB110501 DPA10103-DPB112601 DPA10103-DPB11501 DPA10103-DPB11601 DPA10103-DPB11801 DPA10103-DPB11901 DPA10103-DPB12301 DPA10103-DPB13101 DPA10103-DPB13401 DPA10103-DPB13901 DPA10103-DPB14001 DPA10103-DPB14101 DPA10103-DPB14801 DPA10103-DPB14901 DPA10103-DPB15001 DPA10103-DPB15101 DPA10103-DPB15501 DPA10103-DPB15901 DPA10103-DPB18001 DPA10104-DPB10101 DPA10104-DPB11501 DPA10105-DPB10101 DPA10105-DPB10401 DPA10105-DPB11801 DPA10105-DPB15001 DPA10106-DPB10101 DPA10201-DPB10101 DPA10201-DPB10201 DPA10201-DPB10202 DPA10201-DPB10401 DPA10201-DPB10501 DPA10201-DPB110601 DPA10201-DPB11501 DPA10201-DPB11601 DPA10201-DPB11901 DPA10201-DPB13401 DPA10201-DPB15501 DPA10202-DPB10101 DPA10202-DPB10201 DPA10202-DPB10202 DPA10202-DPB10401 DPA10202-DPB10501 DPA10202-DPB110601 DPA10202-DPB11101 DPA10202-DPB11301 DPA10202-DPB11801 DPA10202-DPB11901 DPA10202-DPB13101; note = HLAs: DPA10202-DPB13801 DPA10202-DPB15501 DPA10202-DPB16501 DPA10301-DPB10101 DPA10301-DPB10201 DPA10301-DPB10202 DPA10301-DPB10401 DPA10301-DPB10402 DPA10301-DPB110501 DPA10301-DPB110601 DPA10301-DPB11101 DPA10301-DPB11301 DPA10301-DPB11801 DPA10301-DPB12301 DPA10301-DPB13901 DPA10301-DPB14001 DPA10301-DPB14901 DPA10301-DPB15501 DPA10301-DPB16501 DPA10301-DPB17501 DPA10301-DPB18001 DPA10401-DPB10101 DPA10401-DPB10201 DPA10401-DPB10202 DPA10401-DPB10402 DPA10401-DPB10501 DPA10401-DPB110501 DPA10401-DPB14901
KEPPLLWQGFELVPDKWTVQ

SEQ ID NO: 6583 - protein, 14 aa, synthetic construct
  source 1..14: note = Seed: PPFLWMGYELHPDK; note = HLAs: DPA10103-DPB10101 DPA10103-DPB10201 DPA10103-DPB10202 DPA10103-DPB10401 DPA10103-DPB112601 DPA10103-DPB11501 DPA10103-DPB11601 DPA10103-DPB11901 DPA10103-DPB12301 DPA10103-DPB13101 DPA10103-DPB13401 DPA10103-DPB13901 DPA10103-DPB14001 DPA10103-DPB14101 DPA10103-DPB14801 DPA10103-DPB15001 DPA10103-DPB15901 DPA10104-DPB10101 DPA10104-DPB11501 DPA10105-DPB10101 DPA10105-DPB10401 DPA10105-DPB15001 DPA10106-DPB10101 DPA10201-DPB10101 DPA10201-DPB110601 DPA10201-DPB11501 DPA10201-DPB11601 DPA10201-DPB11901 DPA10202-DPB10101 DPA10202-DPB10201 DPA10202-DPB10202 DPA10202-DPB10401 DPA10202-DPB110601 DPA10202-DPB11901 DPA10202-DPB13101 DPA10202-DPB16501 DPA10301-DPB10101 DPA10301-DPB10201 DPA10301-DPB10202 DPA10301-DPB10401 DPA10301-DPB10402 DPA10301-DPB110501 DPA10301-DPB110601 DPA10301-DPB11801 DPA10301-DPB12301 DPA10301-DPB13901 DPA10301-DPB14001 DPA10301-DPB14901 DPA10301-DPB15501 DPA10301-DPB16501 DPA10301-DPB17501 DPA10301-DPB18001 DPA10401-DPB10101 DPA10401-DPB10201; note = HLAs: DPA10401-DPB10202 DPA10401-DPB10402 DPA10401-DPB10501 DPA10401-DPB110501 DPA10401-DPB14901
PPILWNGFELIPDK

SEQ ID NO: 6584 - protein, 20 aa, synthetic construct
  source 1..20: note = Seed: KEPPFLWMGYELHPDKWTVQ; note = HLAs: DRB1_0101 DRB1_1001 DPA10103-DPB10101 DPA10103-DPB10201 DPA10103-DPB10202 DPA10103-DPB10401 DPA10103-DPB10402 DPA10103-DPB10501 DPA10103-DPB110501 DPA10103-DPB112601 DPA10103-DPB11501 DPA10103-DPB11601 DPA10103-DPB11801 DPA10103-DPB11901 DPA10103-DPB12301 DPA10103-DPB13101 DPA10103-DPB13401 DPA10103-DPB13901 DPA10103-DPB14001 DPA10103-DPB14101 DPA10103-DPB14801 DPA10103-DPB14901 DPA10103-DPB15001 DPA10103-DPB15101 DPA10103-DPB15501 DPA10103-DPB15901 DPA10103-DPB18001 DPA10104-DPB10101 DPA10104-DPB11501 DPA10105-DPB10101 DPA10105-DPB10401 DPA10105-DPB11801 DPA10105-DPB15001 DPA10106-DPB10101 DPA10201-DPB10101 DPA10201-DPB10201 DPA10201-DPB10202 DPA10201-DPB10401 DPA10201-DPB10501 DPA10201-DPB110601 DPA10201-DPB11501 DPA10201-DPB11601 DPA10201-DPB11901 DPA10201-DPB13401 DPA10201-DPB15501 DPA10202-DPB10101 DPA10202-DPB10201 DPA10202-DPB10202 DPA10202-DPB10401 DPA10202-DPB10501 DPA10202-DPB110601 DPA10202-DPB11101 DPA10202-DPB11301 DPA10202-DPB11801 DPA10202-DPB11901; note = HLAs: DPA10202-DPB13101 DPA10202-DPB13801 DPA10202-DPB15501 DPA10202-DPB16501 DPA10301-DPB10101 DPA10301-DPB10201 DPA10301-DPB10202 DPA10301-DPB10401 DPA10301-DPB10402 DPA10301-DPB110501 DPA10301-DPB110601 DPA10301-DPB11101 DPA10301-DPB11301 DPA10301-DPB11801 DPA10301-DPB12301 DPA10301-DPB13901 DPA10301-DPB14001 DPA10301-DPB14901 DPA10301-DPB15501 DPA10301-DPB16501 DPA10301-DPB17501 DPA10301-DPB18001 DPA10401-DPB10101 DPA10401-DPB10201 DPA10401-DPB10202 DPA10401-DPB10402 DPA10401-DPB10501 DPA10401-DPB110501 DPA10401-DPB14901
KEPPFLWNGFELSPDKWTVQ

SEQ ID NO: 6585 - protein, 20 aa, synthetic construct
  source 1..20: note = Seed: KEPPFLWMGYELHPDKWTVQ; note = HLAs: DPA10103-DPB10101 DPA10103-DPB10201 DPA10103-DPB10202 DPA10103-DPB10401 DPA10103-DPB10402 DPA10103-DPB10501 DPA10103-DPB110501 DPA10103-DPB112601 DPA10103-DPB11501 DPA10103-DPB11601 DPA10103-DPB11801 DPA10103-DPB11901 DPA10103-DPB12301 DPA10103-DPB13101 DPA10103-DPB13401 DPA10103-DPB13901 DPA10103-DPB14001 DPA10103-DPB14101 DPA10103-DPB14801 DPA10103-DPB14901 DPA10103-DPB15001 DPA10103-DPB15101 DPA10103-DPB15501 DPA10103-DPB15901 DPA10103-DPB18001 DPA10104-DPB10101 DPA10104-DPB11501 DPA10105-DPB10101 DPA10105-DPB10401 DPA10105-DPB11801 DPA10105-DPB15001 DPA10106-DPB10101 DPA10201-DPB10101 DPA10201-DPB10201 DPA10201-DPB10202 DPA10201-DPB10401 DPA10201-DPB10501 DPA10201-DPB110601 DPA10201-DPB11501 DPA10201-DPB11601 DPA10201-DPB11901 DPA10201-DPB13401 DPA10201-DPB15501 DPA10202-DPB10101 DPA10202-DPB10201 DPA10202-DPB10202 DPA10202-DPB10401 DPA10202-DPB10501 DPA10202-DPB110601 DPA10202-DPB11101 DPA10202-DPB11301 DPA10202-DPB11801 DPA10202-DPB11901 DPA10202-DPB13101 DPA10202-DPB13801; note = HLAs: DPA10202-DPB15501 DPA10202-DPB16501 DPA10301-DPB10101 DPA10301-DPB10201 DPA10301-DPB10202 DPA10301-DPB10401 DPA10301-DPB10402 DPA10301-DPB110501 DPA10301-DPB110601 DPA10301-DPB11101 DPA10301-DPB11301 DPA10301-DPB11801 DPA10301-DPB12301 DPA10301-DPB13901 DPA10301-DPB14001 DPA10301-DPB14901 DPA10301-DPB15501 DPA10301-DPB16501 DPA10301-DPB17501 DPA10301-DPB18001 DPA10401-DPB10101 DPA10401-DPB10201 DPA10401-DPB10202 DPA10401-DPB10402 DPA10401-DPB10501 DPA10401-DPB110501 DPA10401-DPB14901
KEPPLLWSGFELSPDKWTVQ

SEQ ID NO: 6586 - protein, 14 aa, synthetic construct
  source 1..14: note = Seed: PPFLWMGYELHPDK; note = HLAs: DPA10103-DPB10101 DPA10103-DPB10201 DPA10103-DPB10202 DPA10103-DPB10401 DPA10103-DPB112601 DPA10103-DPB11501 DPA10103-DPB11601 DPA10103-DPB11901 DPA10103-DPB12301 DPA10103-DPB13101 DPA10103-DPB13401 DPA10103-DPB13901 DPA10103-DPB14001 DPA10103-DPB14101 DPA10103-DPB14801 DPA10103-DPB15001 DPA10103-DPB15901 DPA10104-DPB10101 DPA10104-DPB11501 DPA10105-DPB10101 DPA10105-DPB10401 DPA10105-DPB15001 DPA10106-DPB10101 DPA10201-DPB10101 DPA10201-DPB110601 DPA10201-DPB11501 DPA10201-DPB11601 DPA10201-DPB11901 DPA10202-DPB10101 DPA10202-DPB10201 DPA10202-DPB10202 DPA10202-DPB10401 DPA10202-DPB110601 DPA10202-DPB11901 DPA10202-DPB13101 DPA10202-DPB16501 DPA10301-DPB10101 DPA10301-DPB10201 DPA10301-DPB10202 DPA10301-DPB10401 DPA10301-DPB10402 DPA10301-DPB110501 DPA10301-DPB110601 DPA10301-DPB11801 DPA10301-DPB12301 DPA10301-DPB13901 DPA10301-DPB14001 DPA10301-DPB14901 DPA10301-DPB15501 DPA10301-DPB16501 DPA10301-DPB17501 DPA10301-DPB18001 DPA10401-DPB10101 DPA10401-DPB10201; note = HLAs: DPA10401-DPB10202 DPA10401-DPB10402 DPA10401-DPB10501 DPA10401-DPB110501 DPA10401-DPB14901
PPYLWNGFELVPDK

SEQ ID NO: 6587 - protein, 20 aa, synthetic construct
  source 1..20: note = Seed: KEPPFLWMGYELHPDKWTVQ; note = HLAs: DPA10103-DPB10101 DPA10103-DPB10201 DPA10103-DPB10202 DPA10103-DPB10401 DPA10103-DPB10402 DPA10103-DPB10501 DPA10103-DPB110501 DPA10103-DPB112601 DPA10103-DPB11501 DPA10103-DPB11601 DPA10103-DPB11801 DPA10103-DPB11901 DPA10103-DPB12301 DPA10103-DPB13101 DPA10103-DPB13401 DPA10103-DPB13901 DPA10103-DPB14001 DPA10103-DPB14101 DPA10103-DPB14801 DPA10103-DPB14901 DPA10103-DPB15001 DPA10103-DPB15101 DPA10103-DPB15501 DPA10103-DPB15901 DPA10103-DPB18001 DPA10104-DPB10101 DPA10104-DPB11501 DPA10105-DPB10101 DPA10105-DPB10401 DPA10105-DPB11801 DPA10105-DPB15001 DPA10106-DPB10101 DPA10201-DPB10101 DPA10201-DPB10201 DPA10201-DPB10202 DPA10201-DPB10401 DPA10201-DPB10501 DPA10201-DPB110601 DPA10201-DPB11501 DPA10201-DPB11601 DPA10201-DPB11901 DPA10201-DPB13401 DPA10201-DPB15501 DPA10202-DPB10101 DPA10202-DPB10201 DPA10202-DPB10202 DPA10202-DPB10401 DPA10202-DPB10501 DPA10202-DPB110601 DPA10202-DPB11101 DPA10202-DPB11301 DPA10202-DPB11801 DPA10202-DPB11901 DPA10202-DPB13101 DPA10202-DPB13801; note = HLAs: DPA10202-DPB15501 DPA10202-DPB16501 DPA10301-DPB10101 DPA10301-DPB10201 DPA10301-DPB10202 DPA10301-DPB10401 DPA10301-DPB10402 DPA10301-DPB110501 DPA10301-DPB110601 DPA10301-DPB11101 DPA10301-DPB11301 DPA10301-DPB11801 DPA10301-DPB12301 DPA10301-DPB13901 DPA10301-DPB14001 DPA10301-DPB14901 DPA10301-DPB15501 DPA10301-DPB16501 DPA10301-DPB17501 DPA10301-DPB18001 DPA10401-DPB10101 DPA10401-DPB10201 DPA10401-DPB10202 DPA10401-DPB10402 DPA10401-DPB10501 DPA10401-DPB110501 DPA10401-DPB14901
KEPPYLWKGFELLPDKWTVQ

SEQ ID NO: 6588 - protein, 20 aa, synthetic construct
  source 1..20: note = Seed: KEPPFLWMGYELHPDKWTVQ; note = HLAs: DRB1_1001 DPA10103-DPB10101 DPA10103-DPB10201 DPA10103-DPB10202 DPA10103-DPB10401 DPA10103-DPB10402 DPA10103-DPB10501 DPA10103-DPB110501 DPA10103-DPB112601 DPA10103-DPB11501 DPA10103-DPB11601 DPA10103-DPB11801 DPA10103-DPB11901 DPA10103-DPB12301 DPA10103-DPB13101 DPA10103-DPB13401 DPA10103-DPB13901 DPA10103-DPB14001 DPA10103-DPB14101 DPA10103-DPB14801 DPA10103-DPB14901 DPA10103-DPB15001 DPA10103-DPB15101 DPA10103-DPB15501 DPA10103-DPB15901 DPA10103-DPB18001 DPA10104-DPB10101 DPA10104-DPB11501 DPA10105-DPB10101 DPA10105-DPB10401 DPA10105-DPB11801 DPA10105-DPB15001 DPA10106-DPB10101 DPA10201-DPB10101 DPA10201-DPB10201 DPA10201-DPB10202 DPA10201-DPB10401 DPA10201-DPB10501 DPA10201-DPB110601 DPA10201-DPB11501 DPA10201-DPB11601 DPA10201-DPB11901 DPA10201-DPB13401 DPA10201-DPB15501 DPA10202-DPB10101 DPA10202-DPB10201 DPA10202-DPB10202 DPA10202-DPB10401 DPA10202-DPB10501 DPA10202-DPB110601 DPA10202-DPB11101 DPA10202-DPB11301 DPA10202-DPB11801 DPA10202-DPB11901 DPA10202-DPB13101; note = HLAs: DPA10202-DPB13801 DPA10202-DPB15501 DPA10202-DPB16501 DPA10301-DPB10101 DPA10301-DPB10201 DPA10301-DPB10202 DPA10301-DPB10401 DPA10301-DPB10402 DPA10301-DPB110501 DPA10301-DPB110601 DPA10301-DPB11101 DPA10301-DPB11301 DPA10301-DPB11801 DPA10301-DPB12301 DPA10301-DPB13901 DPA10301-DPB14001 DPA10301-DPB14901 DPA10301-DPB15501 DPA10301-DPB16501 DPA10301-DPB17501 DPA10301-DPB18001 DPA10401-DPB10101 DPA10401-DPB10201 DPA10401-DPB10202 DPA10401-DPB10402 DPA10401-DPB10501 DPA10401-DPB110501 DPA10401-DPB14901
KEPPYLWTGFELSPDKWTVQ

SEQ ID NO: 6589 - protein, 20 aa, synthetic construct
  source 1..20: note = Seed: KEPPFLWMGYELHPDKWTVQ; note = HLAs: DPA10103-DPB10101 DPA10103-DPB10201 DPA10103-DPB10202 DPA10103-DPB10401 DPA10103-DPB10402 DPA10103-DPB10501 DPA10103-DPB110501 DPA10103-DPB112601 DPA10103-DPB11501 DPA10103-DPB11601 DPA10103-DPB11801 DPA10103-DPB11901 DPA10103-DPB12301 DPA10103-DPB13101 DPA10103-DPB13401 DPA10103-DPB13901 DPA10103-DPB14001 DPA10103-DPB14101 DPA10103-DPB14801 DPA10103-DPB14901 DPA10103-DPB15001 DPA10103-DPB15101 DPA10103-DPB15501 DPA10103-DPB15901 DPA10103-DPB18001 DPA10104-DPB10101 DPA10104-DPB11501 DPA10105-DPB10101 DPA10105-DPB10401 DPA10105-DPB11801 DPA10105-DPB15001 DPA10106-DPB10101 DPA10201-DPB10101 DPA10201-DPB10201 DPA10201-DPB10202 DPA10201-DPB10401 DPA10201-DPB10501 DPA10201-DPB110601 DPA10201-DPB11501 DPA10201-DPB11601 DPA10201-DPB11901 DPA10201-DPB13401 DPA10201-DPB15501 DPA10202-DPB10101 DPA10202-DPB10201 DPA10202-DPB10202 DPA10202-DPB10401 DPA10202-DPB10501 DPA10202-DPB110601 DPA10202-DPB11101 DPA10202-DPB11301 DPA10202-DPB11801 DPA10202-DPB11901 DPA10202-DPB13101 DPA10202-DPB13801; note = HLAs: DPA10202-DPB15501 DPA10202-DPB16501 DPA10301-DPB10101 DPA10301-DPB10201 DPA10301-DPB10202 DPA10301-DPB10401 DPA10301-DPB10402 DPA10301-DPB110501 DPA10301-DPB110601 DPA10301-DPB11101 DPA10301-DPB11301 DPA10301-DPB11801 DPA10301-DPB12301 DPA10301-DPB13901 DPA10301-DPB14001 DPA10301-DPB14901 DPA10301-DPB15501 DPA10301-DPB16501 DPA10301-DPB17501 DPA10301-DPB18001 DPA10401-DPB10101 DPA10401-DPB10201 DPA10401-DPB10202 DPA10401-DPB10402 DPA10401-DPB10501 DPA10401-DPB110501 DPA10401-DPB14901
KEPPFLWTGFELRPDKWTVQ

SEQ ID NO: 6590 - protein, 20 aa, synthetic construct
  source 1..20: note = Seed: KEPPFLWMGYELHPDKWTVQ; note = HLAs: DRB1_0101 DPA10103-DPB10101 DPA10103-DPB10201 DPA10103-DPB10202 DPA10103-DPB10401 DPA10103-DPB10402 DPA10103-DPB10501 DPA10103-DPB110501 DPA10103-DPB112601 DPA10103-DPB11501 DPA10103-DPB11601 DPA10103-DPB11801 DPA10103-DPB11901 DPA10103-DPB12301 DPA10103-DPB13101 DPA10103-DPB13401 DPA10103-DPB13901 DPA10103-DPB14001 DPA10103-DPB14101 DPA10103-DPB14801 DPA10103-DPB14901 DPA10103-DPB15001 DPA10103-DPB15101 DPA10103-DPB15501 DPA10103-DPB15901 DPA10103-DPB18001 DPA10104-DPB10101 DPA10104-DPB11501 DPA10105-DPB10101 DPA10105-DPB10401 DPA10105-DPB11801 DPA10105-DPB15001 DPA10106-DPB10101 DPA10201-DPB10101 DPA10201-DPB10201 DPA10201-DPB10202 DPA10201-DPB10401 DPA10201-DPB10501 DPA10201-DPB110601 DPA10201-DPB11501 DPA10201-DPB11601 DPA10201-DPB11901 DPA10201-DPB13401 DPA10201-DPB15501 DPA10202-DPB10101 DPA10202-DPB10201 DPA10202-DPB10202 DPA10202-DPB10401 DPA10202-DPB10501 DPA10202-DPB110601 DPA10202-DPB11101 DPA10202-DPB11301 DPA10202-DPB11801 DPA10202-DPB11901 DPA10202-DPB13101; note = HLAs: DPA10202-DPB13801 DPA10202-DPB15501 DPA10202-DPB16501 DPA10301-DPB10101 DPA10301-DPB10201 DPA10301-DPB10202 DPA10301-DPB10401 DPA10301-DPB10402 DPA10301-DPB110501 DPA10301-DPB110601 DPA10301-DPB11101 DPA10301-DPB11301 DPA10301-DPB11801 DPA10301-DPB12301 DPA10301-DPB13901 DPA10301-DPB14001 DPA10301-DPB14901 DPA10301-DPB15501 DPA10301-DPB16501 DPA10301-DPB17501 DPA10301-DPB18001 DPA10401-DPB10101 DPA10401-DPB10201 DPA10401-DPB10202 DPA10401-DPB10402 DPA10401-DPB10501 DPA10401-DPB110501 DPA10401-DPB14901
KEPPFLWQGYELIPDKWTVQ

SEQ ID NO: 6591 - protein, 14 aa, synthetic construct
  source 1..14: note = Seed: PPFLWMGYELHPDK; note = HLAs: DPA10103-DPB10101 DPA10103-DPB10201 DPA10103-DPB10202 DPA10103-DPB10401 DPA10103-DPB112601 DPA10103-DPB11501 DPA10103-DPB11601 DPA10103-DPB11901 DPA10103-DPB12301 DPA10103-DPB13101 DPA10103-DPB13401 DPA10103-DPB13901 DPA10103-DPB14001 DPA10103-DPB14101 DPA10103-DPB14801 DPA10103-DPB15001 DPA10103-DPB15901 DPA10104-DPB10101 DPA10104-DPB11501 DPA10105-DPB10101 DPA10105-DPB10401 DPA10105-DPB15001 DPA10106-DPB10101 DPA10201-DPB10101 DPA10201-DPB110601 DPA10201-DPB11501 DPA10201-DPB11601 DPA10201-DPB11901 DPA10202-DPB10101 DPA10202-DPB10201 DPA10202-DPB10202 DPA10202-DPB10401 DPA10202-DPB110601 DPA10202-DPB11901 DPA10202-DPB13101 DPA10202-DPB16501 DPA10301-DPB10101 DPA10301-DPB10201 DPA10301-DPB10202 DPA10301-DPB10401 DPA10301-DPB10402 DPA10301-DPB110501 DPA10301-DPB110601 DPA10301-DPB11801 DPA10301-DPB12301 DPA10301-DPB13901 DPA10301-DPB14001 DPA10301-DPB14901 DPA10301-DPB15501 DPA10301-DPB16501 DPA10301-DPB17501 DPA10301-DPB18001 DPA10401-DPB10101 DPA10401-DPB10201; note = HLAs: DPA10401-DPB10202 DPA10401-DPB10402 DPA10401-DPB10501 DPA10401-DPB110501 DPA10401-DPB14901
PPLLWSGFELSPDK

SEQ ID NO: 6592 - protein, 14 aa, synthetic construct
  source 1..14: note = Seed: PPFLWMGYELHPDK; note = HLAs: DPA10103-DPB10101 DPA10103-DPB10201 DPA10103-DPB10202 DPA10103-DPB10401 DPA10103-DPB112601 DPA10103-DPB11501 DPA10103-DPB11601 DPA10103-DPB11901 DPA10103-DPB12301 DPA10103-DPB13101 DPA10103-DPB13401 DPA10103-DPB13901 DPA10103-DPB14001 DPA10103-DPB14101 DPA10103-DPB14801 DPA10103-DPB15001 DPA10103-DPB15901 DPA10104-DPB10101 DPA10104-DPB11501 DPA10105-DPB10101 DPA10105-DPB10401 DPA10105-DPB15001 DPA10106-DPB10101 DPA10201-DPB10101 DPA10201-DPB110601 DPA10201-DPB11501 DPA10201-DPB11601 DPA10201-DPB11901 DPA10202-DPB10101 DPA10202-DPB10201 DPA10202-DPB10202 DPA10202-DPB10401 DPA10202-DPB110601 DPA10202-DPB11901 DPA10202-DPB13101 DPA10202-DPB16501 DPA10301-DPB10101 DPA10301-DPB10201 DPA10301-DPB10202 DPA10301-DPB10401 DPA10301-DPB10402 DPA10301-DPB110501 DPA10301-DPB110601 DPA10301-DPB11801 DPA10301-DPB12301 DPA10301-DPB13901 DPA10301-DPB14001 DPA10301-DPB14901 DPA10301-DPB15501 DPA10301-DPB16501 DPA10301-DPB17501 DPA10301-DPB18001 DPA10401-DPB10101 DPA10401-DPB10201; note = HLAs: DPA10401-DPB10202 DPA10401-DPB10402 DPA10401-DPB10501 DPA10401-DPB110501 DPA10401-DPB14901
PPFLWSGWELMPDK

SEQ ID NO: 6593 - protein, 14 aa, synthetic construct
  source 1..14: note = Seed: PPFLWMGYELHPDK; note = HLAs: DPA10103-DPB10101 DPA10103-DPB10201 DPA10103-DPB10202 DPA10103-DPB10401 DPA10103-DPB112601 DPA10103-DPB11501 DPA10103-DPB11601 DPA10103-DPB11901 DPA10103-DPB12301 DPA10103-DPB13101 DPA10103-DPB13401 DPA10103-DPB13901 DPA10103-DPB14001 DPA10103-DPB14101 DPA10103-DPB14801 DPA10103-DPB15001 DPA10103-DPB15901 DPA10104-DPB10101 DPA10104-DPB11501 DPA10105-DPB10101 DPA10105-DPB10401 DPA10105-DPB15001 DPA10106-DPB10101 DPA10201-DPB10101 DPA10201-DPB110601 DPA10201-DPB11501 DPA10201-DPB11601 DPA10201-DPB11901 DPA10202-DPB10101 DPA10202-DPB10201 DPA10202-DPB10202 DPA10202-DPB10401 DPA10202-DPB110601 DPA10202-DPB11901 DPA10202-DPB13101 DPA10202-DPB16501 DPA10301-DPB10101 DPA10301-DPB10201 DPA10301-DPB10202 DPA10301-DPB10401 DPA10301-DPB10402 DPA10301-DPB110501 DPA10301-DPB110601 DPA10301-DPB11801 DPA10301-DPB12301 DPA10301-DPB13901 DPA10301-DPB14001 DPA10301-DPB14901 DPA10301-DPB15501 DPA10301-DPB16501 DPA10301-DPB17501 DPA10301-DPB18001 DPA10401-DPB10101 DPA10401-DPB10201; note = HLAs: DPA10401-DPB10202 DPA10401-DPB10402 DPA10401-DPB10501 DPA10401-DPB110501 DPA10401-DPB14901
PPFLWNGFELYPDK

SEQ ID NO: 6594 - protein, 14 aa, synthetic construct
  source 1..14: note = Seed: PPFLWMGYELHPDK; note = HLAs: DPA10103-DPB10201 DPA10103-DPB10202 DPA10103-DPB10401 DPA10103-DPB112601 DPA10103-DPB11501 DPA10103-DPB11601 DPA10103-DPB11901 DPA10103-DPB12301 DPA10103-DPB13101 DPA10103-DPB13401 DPA10103-DPB13901 DPA10103-DPB14001 DPA10103-DPB14101 DPA10103-DPB14801 DPA10103-DPB15001 DPA10103-DPB15901 DPA10104-DPB11501 DPA10105-DPB10401 DPA10105-DPB15001 DPA10106-DPB10101 DPA10201-DPB10101 DPA10201-DPB110601 DPA10201-DPB11501 DPA10201-DPB11601 DPA10201-DPB11901 DPA10202-DPB10101 DPA10202-DPB10201 DPA10202-DPB10202 DPA10202-DPB10401 DPA10202-DPB110601 DPA10202-DPB11901 DPA10202-DPB13101 DPA10202-DPB16501 DPA10301-DPB10201 DPA10301-DPB10202 DPA10301-DPB10401 DPA10301-DPB10402 DPA10301-DPB110501 DPA10301-DPB110601 DPA10301-DPB11801 DPA10301-DPB12301 DPA10301-DPB13901 DPA10301-DPB14001 DPA10301-DPB14901 DPA10301-DPB15501 DPA10301-DPB17501 DPA10301-DPB18001 DPA10401-DPB10201 DPA10401-DPB10202 DPA10401-DPB10402 DPA10401-DPB10501 DPA10401-DPB110501 DPA10401-DPB14901
PPFLWHGIELLPDK

SEQ ID NO: 6595 - protein, 14 aa, synthetic construct
  source 1..14: note = Seed: PPFLWMGYELHPDK; note = HLAs: DRB1_1001 DPA10103-DPB10201 DPA10103-DPB10202 DPA10103-DPB10401 DPA10103-DPB112601 DPA10103-DPB11501 DPA10103-DPB11601 DPA10103-DPB11901 DPA10103-DPB12301 DPA10103-DPB13401 DPA10103-DPB13901 DPA10103-DPB14001 DPA10103-DPB14101 DPA10103-DPB14801 DPA10103-DPB15901 DPA10104-DPB11501 DPA10105-DPB10401 DPA10106-DPB10101 DPA10201-DPB10101 DPA10201-DPB110601 DPA10201-DPB11501 DPA10201-DPB11601 DPA10201-DPB11901 DPA10202-DPB10101 DPA10202-DPB10201 DPA10202-DPB10202 DPA10202-DPB10401 DPA10202-DPB110601 DPA10202-DPB11901 DPA10202-DPB13101 DPA10202-DPB16501 DPA10301-DPB10101 DPA10301-DPB10201 DPA10301-DPB10202 DPA10301-DPB10401 DPA10301-DPB10402 DPA10301-DPB110501 DPA10301-DPB110601 DPA10301-DPB11801 DPA10301-DPB12301 DPA10301-DPB13901 DPA10301-DPB14001 DPA10301-DPB14901 DPA10301-DPB15501 DPA10301-DPB16501 DPA10301-DPB17501 DPA10301-DPB18001 DPA10401-DPB10201 DPA10401-DPB10202 DPA10401-DPB10402 DPA10401-DPB10501 DPA10401-DPB110501 DPA10401-DPB14901
PPFLWIGIELLPDK

SEQ ID NO: 6596 - protein, 14 aa, synthetic construct
  source 1..14: note = Seed: PPFLWMGYELHPDK; note = HLAs: DPA10103-DPB10101 DPA10103-DPB10201 DPA10103-DPB10202 DPA10103-DPB10401 DPA10103-DPB112601 DPA10103-DPB11501 DPA10103-DPB11601 DPA10103-DPB11901 DPA10103-DPB12301 DPA10103-DPB13101 DPA10103-DPB13401 DPA10103-DPB13901 DPA10103-DPB14001 DPA10103-DPB14101 DPA10103-DPB14801 DPA10103-DPB15001 DPA10103-DPB15901 DPA10104-DPB10101 DPA10104-DPB11501 DPA10105-DPB10101 DPA10105-DPB10401 DPA10105-DPB15001 DPA10106-DPB10101 DPA10201-DPB10101 DPA10201-DPB110601 DPA10201-DPB11501 DPA10201-DPB11601 DPA10201-DPB11901 DPA10202-DPB10101 DPA10202-DPB10201 DPA10202-DPB10202 DPA10202-DPB10401 DPA10202-DPB110601 DPA10202-DPB11901 DPA10202-DPB13101 DPA10202-DPB16501 DPA10301-DPB10101 DPA10301-DPB10201 DPA10301-DPB10202 DPA10301-DPB10401 DPA10301-DPB10402 DPA10301-DPB110501 DPA10301-DPB110601 DPA10301-DPB11801 DPA10301-DPB12301 DPA10301-DPB13901 DPA10301-DPB14001 DPA10301-DPB14901 DPA10301-DPB15501 DPA10301-DPB16501 DPA10301-DPB17501 DPA10301-DPB18001 DPA10401-DPB10101 DPA10401-DPB10201; note = HLAs: DPA10401-DPB10202 DPA10401-DPB10402 DPA10401-DPB10501 DPA10401-DPB110501 DPA10401-DPB14901
PPFLWEGLELLPDK

SEQ ID NO: 6597 - protein, 20 aa, synthetic construct
  source 1..20: note = Seed: KEPPFLWMGYELHPDKWTVQ; note = HLAs: DRB1_0101 DRB1_1001 DPA10103-DPB10101 DPA10103-DPB10201 DPA10103-DPB10202 DPA10103-DPB10401 DPA10103-DPB10402 DPA10103-DPB10501 DPA10103-DPB110501 DPA10103-DPB112601 DPA10103-DPB11501 DPA10103-DPB11601 DPA10103-DPB11801 DPA10103-DPB11901 DPA10103-DPB12301 DPA10103-DPB13101 DPA10103-DPB13401 DPA10103-DPB13901 DPA10103-DPB14001 DPA10103-DPB14101 DPA10103-DPB14801 DPA10103-DPB14901 DPA10103-DPB15001 DPA10103-DPB15101 DPA10103-DPB15501 DPA10103-DPB15901 DPA10103-DPB18001 DPA10104-DPB10101 DPA10104-DPB11501 DPA10105-DPB10101 DPA10105-DPB10401 DPA10105-DPB11801 DPA10105-DPB15001 DPA10106-DPB10101 DPA10201-DPB10101 DPA10201-DPB10201 DPA10201-DPB10202 DPA10201-DPB10401 DPA10201-DPB10501 DPA10201-DPB110601 DPA10201-DPB11501 DPA10201-DPB11601 DPA10201-DPB11901 DPA10201-DPB13401 DPA10201-DPB15501 DPA10202-DPB10101 DPA10202-DPB10201 DPA10202-DPB10202 DPA10202-DPB10401 DPA10202-DPB10501 DPA10202-DPB110601 DPA10202-DPB11101 DPA10202-DPB11301 DPA10202-DPB11801 DPA10202-DPB11901; note = HLAs: DPA10202-DPB13101 DPA10202-DPB13801 DPA10202-DPB15501 DPA10202-DPB16501 DPA10301-DPB10101 DPA10301-DPB10201 DPA10301-DPB10202 DPA10301-DPB10401 DPA10301-DPB10402 DPA10301-DPB110501 DPA10301-DPB110601 DPA10301-DPB11101 DPA10301-DPB11301 DPA10301-DPB11801 DPA10301-DPB12301 DPA10301-DPB13901 DPA10301-DPB14001 DPA10301-DPB14901 DPA10301-DPB15501 DPA10301-DPB16501 DPA10301-DPB17501 DPA10301-DPB18001 DPA10401-DPB10101 DPA10401-DPB10201 DPA10401-DPB10202 DPA10401-DPB10402 DPA10401-DPB10501 DPA10401-DPB110501 DPA10401-DPB14901
KEPPFLWQGFELSPDKWTVQ

SEQ ID NO: 6598 - protein, 20 aa, synthetic construct
  source 1..20: note = Seed: KEPPFLWMGYELHPDKWTVQ; note = HLAs: DRB1_0101 DPA10103-DPB10101 DPA10103-DPB10201 DPA10103-DPB10202 DPA10103-DPB10401 DPA10103-DPB10402 DPA10103-DPB10501 DPA10103-DPB110501 DPA10103-DPB112601 DPA10103-DPB11501 DPA10103-DPB11601 DPA10103-DPB11801 DPA10103-DPB11901 DPA10103-DPB12301 DPA10103-DPB13101 DPA10103-DPB13401 DPA10103-DPB13901 DPA10103-DPB14001 DPA10103-DPB14101 DPA10103-DPB14801 DPA10103-DPB14901 DPA10103-DPB15001 DPA10103-DPB15101 DPA10103-DPB15501 DPA10103-DPB15901 DPA10103-DPB18001 DPA10104-DPB10101 DPA10104-DPB11501 DPA10105-DPB10101 DPA10105-DPB10401 DPA10105-DPB11801 DPA10105-DPB15001 DPA10106-DPB10101 DPA10201-DPB10101 DPA10201-DPB10201 DPA10201-DPB10202 DPA10201-DPB10401 DPA10201-DPB10501 DPA10201-DPB110601 DPA10201-DPB11501 DPA10201-DPB11601 DPA10201-DPB11901 DPA10201-DPB13401 DPA10201-DPB15501 DPA10202-DPB10101 DPA10202-DPB10201 DPA10202-DPB10202 DPA10202-DPB10401 DPA10202-DPB10501 DPA10202-DPB110601 DPA10202-DPB11101 DPA10202-DPB11301 DPA10202-DPB11801 DPA10202-DPB11901 DPA10202-DPB13101; note = HLAs: DPA10202-DPB13801 DPA10202-DPB15501 DPA10202-DPB16501 DPA10301-DPB10101 DPA10301-DPB10201 DPA10301-DPB10202 DPA10301-DPB10401 DPA10301-DPB10402 DPA10301-DPB110501 DPA10301-DPB110601 DPA10301-DPB11101 DPA10301-DPB11301 DPA10301-DPB11801 DPA10301-DPB12301 DPA10301-DPB13901 DPA10301-DPB14001 DPA10301-DPB14901 DPA10301-DPB15501 DPA10301-DPB16501 DPA10301-DPB17501 DPA10301-DPB18001 DPA10401-DPB10101 DPA10401-DPB10201 DPA10401-DPB10202 DPA10401-DPB10402 DPA10401-DPB10501 DPA10401-DPB110501 DPA10401-DPB14901
KEPPFLWQGYELVPDKWTVQ

SEQ ID NO: 6599 - protein, 20 aa, synthetic construct
  source 1..20: note = Seed: KEPPFLWMGYELHPDKWTVQ; note = HLAs: DRB1_0101 DPA10103-DPB10101 DPA10103-DPB10201 DPA10103-DPB10202 DPA10103-DPB10401 DPA10103-DPB10402 DPA10103-DPB10501 DPA10103-DPB110501 DPA10103-DPB112601 DPA10103-DPB11501 DPA10103-DPB11601 DPA10103-DPB11801 DPA10103-DPB11901 DPA10103-DPB12301 DPA10103-DPB13101 DPA10103-DPB13401 DPA10103-DPB13901 DPA10103-DPB14001 DPA10103-DPB14101 DPA10103-DPB14801 DPA10103-DPB14901 DPA10103-DPB15001 DPA10103-DPB15101 DPA10103-DPB15501 DPA10103-DPB15901 DPA10103-DPB18001 DPA10104-DPB10101 DPA10104-DPB11501 DPA10105-DPB10101 DPA10105-DPB10401 DPA10105-DPB11801 DPA10105-DPB15001 DPA10106-DPB10101 DPA10201-DPB10101 DPA10201-DPB10201 DPA10201-DPB10202 DPA10201-DPB10401 DPA10201-DPB10501 DPA10201-DPB110601 DPA10201-DPB11501 DPA10201-DPB11601 DPA10201-DPB11901 DPA10201-DPB13401 DPA10201-DPB15501 DPA10202-DPB10101 DPA10202-DPB10201 DPA10202-DPB10202 DPA10202-DPB10401 DPA10202-DPB10501 DPA10202-DPB110601 DPA10202-DPB11101 DPA10202-DPB11301 DPA10202-DPB11801 DPA10202-DPB11901 DPA10202-DPB13101; note = HLAs: DPA10202-DPB13801 DPA10202-DPB15501 DPA10202-DPB16501 DPA10301-DPB10101 DPA10301-DPB10201 DPA10301-DPB10202 DPA10301-DPB10401 DPA10301-DPB10402 DPA10301-DPB110501 DPA10301-DPB110601 DPA10301-DPB11101 DPA10301-DPB11301 DPA10301-DPB11801 DPA10301-DPB12301 DPA10301-DPB13901 DPA10301-DPB14001 DPA10301-DPB14901 DPA10301-DPB15501 DPA10301-DPB16501 DPA10301-DPB17501 DPA10301-DPB18001 DPA10401-DPB10101 DPA10401-DPB10201 DPA10401-DPB10202 DPA10401-DPB10402 DPA10401-DPB10501 DPA10401-DPB110501 DPA10401-DPB14901
KEPPILWNGFELVPDKWTVQ

SEQ ID NO: 6600 - protein, 20 aa, synthetic construct
  source 1..20: note = Seed: KEPPFLWMGYELHPDKWTVQ; note = HLAs: DRB1_0101 DPA10103-DPB10101 DPA10103-DPB10201 DPA10103-DPB10202 DPA10103-DPB10401 DPA10103-DPB10402 DPA10103-DPB10501 DPA10103-DPB110501 DPA10103-DPB112601 DPA10103-DPB11501 DPA10103-DPB11601 DPA10103-DPB11801 DPA10103-DPB11901 DPA10103-DPB12301 DPA10103-DPB13101 DPA10103-DPB13401 DPA10103-DPB13901 DPA10103-DPB14001 DPA10103-DPB14101 DPA10103-DPB14801 DPA10103-DPB14901 DPA10103-DPB15001 DPA10103-DPB15101 DPA10103-DPB15501 DPA10103-DPB15901 DPA10103-DPB18001 DPA10104-DPB10101 DPA10104-DPB11501 DPA10105-DPB10101 DPA10105-DPB10401 DPA10105-DPB11801 DPA10105-DPB15001 DPA10106-DPB10101 DPA10201-DPB10101 DPA10201-DPB10201 DPA10201-DPB10202 DPA10201-DPB10401 DPA10201-DPB10501 DPA10201-DPB110601 DPA10201-DPB11501 DPA10201-DPB11601 DPA10201-DPB11901 DPA10201-DPB13401 DPA10201-DPB15501 DPA10202-DPB10101 DPA10202-DPB10201 DPA10202-DPB10202 DPA10202-DPB10401 DPA10202-DPB10501 DPA10202-DPB110601 DPA10202-DPB11101 DPA10202-DPB11301 DPA10202-DPB11801 DPA10202-DPB11901 DPA10202-DPB13101; note = HLAs: DPA10202-DPB13801 DPA10202-DPB15501 DPA10202-DPB16501 DPA10301-DPB10101 DPA10301-DPB10201 DPA10301-DPB10202 DPA10301-DPB10401 DPA10301-DPB10402 DPA10301-DPB110501 DPA10301-DPB110601 DPA10301-DPB11101 DPA10301-DPB11301 DPA10301-DPB11801 DPA10301-DPB12301 DPA10301-DPB13901 DPA10301-DPB14001 DPA10301-DPB14901 DPA10301-DPB15501 DPA10301-DPB16501 DPA10301-DPB17501 DPA10301-DPB18001 DPA10401-DPB10101 DPA10401-DPB10201 DPA10401-DPB10202 DPA10401-DPB10402 DPA10401-DPB10501 DPA10401-DPB110501 DPA10401-DPB14901
KEPPILWNGFELIPDKWTVQ

SEQ ID NO: 6601 - protein, 20 aa, synthetic construct
  source 1..20: note = Seed: KEPPFLWMGYELHPDKWTVQ; note = HLAs: DRB1_0101 DPA10103-DPB10101 DPA10103-DPB10201 DPA10103-DPB10202 DPA10103-DPB10401 DPA10103-DPB10402 DPA10103-DPB10501 DPA10103-DPB110501 DPA10103-DPB112601 DPA10103-DPB11501 DPA10103-DPB11601 DPA10103-DPB11801 DPA10103-DPB11901 DPA10103-DPB12301 DPA10103-DPB13101 DPA10103-DPB13401 DPA10103-DPB13901 DPA10103-DPB14001 DPA10103-DPB14101 DPA10103-DPB14801 DPA10103-DPB14901 DPA10103-DPB15001 DPA10103-DPB15101 DPA10103-DPB15501 DPA10103-DPB15901 DPA10103-DPB18001 DPA10104-DPB10101 DPA10104-DPB11501 DPA10105-DPB10101 DPA10105-DPB10401 DPA10105-DPB11801 DPA10105-DPB15001 DPA10106-DPB10101 DPA10201-DPB10101 DPA10201-DPB10201 DPA10201-DPB10202 DPA10201-DPB10401 DPA10201-DPB10501 DPA10201-DPB110601 DPA10201-DPB11501 DPA10201-DPB11601 DPA10201-DPB11901 DPA10201-DPB13401 DPA10201-DPB15501 DPA10202-DPB10101 DPA10202-DPB10201 DPA10202-DPB10202 DPA10202-DPB10401 DPA10202-DPB10501 DPA10202-DPB110601 DPA10202-DPB11101 DPA10202-DPB11301 DPA10202-DPB11801 DPA10202-DPB11901 DPA10202-DPB13101; note = HLAs: DPA10202-DPB13801 DPA10202-DPB15501 DPA10202-DPB16501 DPA10301-DPB10101 DPA10301-DPB10201 DPA10301-DPB10202 DPA10301-DPB10401 DPA10301-DPB10402 DPA10301-DPB110501 DPA10301-DPB110601 DPA10301-DPB11101 DPA10301-DPB11301 DPA10301-DPB11801 DPA10301-DPB12301 DPA10301-DPB13901 DPA10301-DPB14001 DPA10301-DPB14901 DPA10301-DPB15501 DPA10301-DPB16501 DPA10301-DPB17501 DPA10301-DPB18001 DPA10401-DPB10101 DPA10401-DPB10201 DPA10401-DPB10202 DPA10401-DPB10402 DPA10401-DPB10501 DPA10401-DPB110501 DPA10401-DPB14901
KEPPFLWQGYELLPDKWTVQ

SEQ ID NO: 6602 - protein, 20 aa, synthetic construct
  source 1..20: note = Seed: KEPPFLWMGYELHPDKWTVQ; note = HLAs: DPA10103-DPB10101 DPA10103-DPB10201 DPA10103-DPB10202 DPA10103-DPB10401 DPA10103-DPB10402 DPA10103-DPB10501 DPA10103-DPB110501 DPA10103-DPB112601 DPA10103-DPB11501 DPA10103-DPB11601 DPA10103-DPB11801 DPA10103-DPB11901 DPA10103-DPB12301 DPA10103-DPB13101 DPA10103-DPB13401 DPA10103-DPB13901 DPA10103-DPB14001 DPA10103-DPB14101 DPA10103-DPB14801 DPA10103-DPB14901 DPA10103-DPB15001 DPA10103-DPB15101 DPA10103-DPB15501 DPA10103-DPB15901 DPA10103-DPB18001 DPA10104-DPB10101 DPA10104-DPB11501 DPA10105-DPB10101 DPA10105-DPB10401 DPA10105-DPB11801 DPA10105-DPB15001 DPA10106-DPB10101 DPA10201-DPB10101 DPA10201-DPB10201 DPA10201-DPB10202 DPA10201-DPB10401 DPA10201-DPB10501 DPA10201-DPB110601 DPA10201-DPB11501 DPA10201-DPB11601 DPA10201-DPB11901 DPA10201-DPB13401 DPA10201-DPB15501 DPA10202-DPB10101 DPA10202-DPB10201 DPA10202-DPB10202 DPA10202-DPB10401 DPA10202-DPB10501 DPA10202-DPB110601 DPA10202-DPB11101 DPA10202-DPB11301 DPA10202-DPB11801 DPA10202-DPB11901 DPA10202-DPB13101 DPA10202-DPB13801; note = HLAs: DPA10202-DPB15501 DPA10202-DPB16501 DPA10301-DPB10101 DPA10301-DPB10201 DPA10301-DPB10202 DPA10301-DPB10401 DPA10301-DPB10402 DPA10301-DPB110501 DPA10301-DPB110601 DPA10301-DPB11101 DPA10301-DPB11301 DPA10301-DPB11801 DPA10301-DPB12301 DPA10301-DPB13901 DPA10301-DPB14001 DPA10301-DPB14901 DPA10301-DPB15501 DPA10301-DPB16501 DPA10301-DPB17501 DPA10301-DPB18001 DPA10401-DPB10101 DPA10401-DPB10201 DPA10401-DPB10202 DPA10401-DPB10402 DPA10401-DPB10501 DPA10401-DPB110501 DPA10401-DPB14901
KEPPFLWSGWELMPDKWTVQ

SEQ ID NO: 6603 - protein, 20 aa, synthetic construct
  source 1..20: note = Seed: KEPPFLWMGYELHPDKWTVQ; note = HLAs: DRB1_0101 DRB1_1001 DPA10103-DPB10101 DPA10103-DPB10201 DPA10103-DPB10202 DPA10103-DPB10401 DPA10103-DPB10402 DPA10103-DPB10501 DPA10103-DPB110501 DPA10103-DPB112601 DPA10103-DPB11501 DPA10103-DPB11601 DPA10103-DPB11801 DPA10103-DPB11901 DPA10103-DPB12301 DPA10103-DPB13101 DPA10103-DPB13401 DPA10103-DPB13901 DPA10103-DPB14001 DPA10103-DPB14101 DPA10103-DPB14801 DPA10103-DPB14901 DPA10103-DPB15001 DPA10103-DPB15101 DPA10103-DPB15501 DPA10103-DPB15901 DPA10103-DPB18001 DPA10104-DPB10101 DPA10104-DPB11501 DPA10105-DPB10101 DPA10105-DPB10401 DPA10105-DPB11801 DPA10105-DPB15001 DPA10106-DPB10101 DPA10201-DPB10101 DPA10201-DPB10201 DPA10201-DPB10202 DPA10201-DPB10401 DPA10201-DPB10501 DPA10201-DPB110601 DPA10201-DPB11501 DPA10201-DPB11601 DPA10201-DPB11901 DPA10201-DPB13401 DPA10201-DPB15501 DPA10202-DPB10101 DPA10202-DPB10201 DPA10202-DPB10202 DPA10202-DPB10401 DPA10202-DPB10501 DPA10202-DPB110601 DPA10202-DPB11101 DPA10202-DPB11301 DPA10202-DPB11801 DPA10202-DPB11901; note = HLAs: DPA10202-DPB13101 DPA10202-DPB13801 DPA10202-DPB15501 DPA10202-DPB16501 DPA10301-DPB10101 DPA10301-DPB10201 DPA10301-DPB10202 DPA10301-DPB10401 DPA10301-DPB10402 DPA10301-DPB110501 DPA10301-DPB110601 DPA10301-DPB11101 DPA10301-DPB11301 DPA10301-DPB11801 DPA10301-DPB12301 DPA10301-DPB13901 DPA10301-DPB14001 DPA10301-DPB14901 DPA10301-DPB15501 DPA10301-DPB16501 DPA10301-DPB17501 DPA10301-DPB18001 DPA10401-DPB10101 DPA10401-DPB10201 DPA10401-DPB10202 DPA10401-DPB10402 DPA10401-DPB10501 DPA10401-DPB110501 DPA10401-DPB14901
KEPPFLWMGYELVPDKWTVQ

SEQ ID NO: 6604 - protein, 14 aa, synthetic construct
  source 1..14: note = Seed: PPFLWMGYELHPDK; note = HLAs: DPA10103-DPB10101 DPA10103-DPB10201 DPA10103-DPB10202 DPA10103-DPB10401 DPA10103-DPB112601 DPA10103-DPB11501 DPA10103-DPB11601 DPA10103-DPB11901 DPA10103-DPB12301 DPA10103-DPB13101 DPA10103-DPB13401 DPA10103-DPB13901 DPA10103-DPB14001 DPA10103-DPB14101 DPA10103-DPB14801 DPA10103-DPB15001 DPA10103-DPB15901 DPA10104-DPB10101 DPA10104-DPB11501 DPA10105-DPB10101 DPA10105-DPB10401 DPA10105-DPB15001 DPA10106-DPB10101 DPA10201-DPB10101 DPA10201-DPB110601 DPA10201-DPB11501 DPA10201-DPB11601 DPA10201-DPB11901 DPA10202-DPB10101 DPA10202-DPB10201 DPA10202-DPB10202 DPA10202-DPB10401 DPA10202-DPB110601 DPA10202-DPB11901 DPA10202-DPB13101 DPA10202-DPB16501 DPA10301-DPB10101 DPA10301-DPB10201 DPA10301-DPB10202 DPA10301-DPB10401 DPA10301-DPB10402 DPA10301-DPB110501 DPA10301-DPB110601 DPA10301-DPB11801 DPA10301-DPB12301 DPA10301-DPB13901 DPA10301-DPB14001 DPA10301-DPB14901 DPA10301-DPB15501 DPA10301-DPB16501 DPA10301-DPB17501 DPA10301-DPB18001 DPA10401-DPB10101 DPA10401-DPB10201; note = HLAs: DPA10401-DPB10202 DPA10401-DPB10402 DPA10401-DPB10501 DPA10401-DPB110501 DPA10401-DPB14901
PPFLWSGFELPPDK

SEQ ID NO: 6605 - protein, 20 aa, synthetic construct
  source 1..20: note = Seed: KEPPFLWMGYELHPDKWTVQ; note = HLAs: DRB1_1602 DQA10101-DQB10501 DQA10101-DQB10503 DQA10102-DQB10501 DQA10102-DQB10502 DQA10102-DQB10503 DQA10103-DQB10501 DQA10104-DQB10501 DQA10104-DQB10503 DQA10105-DQB10501 DQA10107-DQB10503 DQA10505-DQB10402
KEPPFLIMGFEIHPVKWTVQ

SEQ ID NO: 6606 - protein, 20 aa, synthetic construct
  source 1..20: note = Seed: KEPPFLWMGYELHPDKWTVQ; note = HLAs: DRB1_1602 DQA10101-DQB10501 DQA10101-DQB10503 DQA10102-DQB10501 DQA10102-DQB10502 DQA10102-DQB10503 DQA10103-DQB10501 DQA10104-DQB10501 DQA10104-DQB10503 DQA10105-DQB10501 DQA10107-DQB10503 DQA10505-DQB10402
KEPPFLIMGFEIHPAKWTVQ

SEQ ID NO: 6607 - protein, 14 aa, synthetic construct
  source 1..14: note = Seed: PPFLWMGYELHPDK; note = HLAs: DQA10101-DQB10501 DQA10101-DQB10503 DQA10102-DQB10501 DQA10102-DQB10502 DQA10102-DQB10503 DQA10103-DQB10501 DQA10104-DQB10501 DQA10104-DQB10503 DQA10105-DQB10501 DQA10107-DQB10503
PPFLIMGFEDHPAK

SEQ ID NO: 6608 - protein, 14 aa, synthetic construct
  source 1..14: note = Seed: PPFLWMGYELHPDK; note = HLAs: DPA10103-DPB10101 DPA10103-DPB10201 DPA10103-DPB10202 DPA10103-DPB10401 DPA10103-DPB112601 DPA10103-DPB11501 DPA10103-DPB11601 DPA10103-DPB11901 DPA10103-DPB12301 DPA10103-DPB13101 DPA10103-DPB13401 DPA10103-DPB13901 DPA10103-DPB14001 DPA10103-DPB14101 DPA10103-DPB14801 DPA10103-DPB15001 DPA10103-DPB15901 DPA10104-DPB10101 DPA10104-DPB11501 DPA10105-DPB10101 DPA10105-DPB10401 DPA10105-DPB15001 DPA10106-DPB10101 DPA10201-DPB10101 DPA10201-DPB110601 DPA10201-DPB11501 DPA10201-DPB11601 DPA10201-DPB11901 DPA10202-DPB10101 DPA10202-DPB10201 DPA10202-DPB10202 DPA10202-DPB10401 DPA10202-DPB110601 DPA10202-DPB11901 DPA10202-DPB13101 DPA10202-DPB16501 DPA10301-DPB10101 DPA10301-DPB10201 DPA10301-DPB10202 DPA10301-DPB10401 DPA10301-DPB10402 DPA10301-DPB110501 DPA10301-DPB110601 DPA10301-DPB11801 DPA10301-DPB12301 DPA10301-DPB13901 DPA10301-DPB14001 DPA10301-DPB14901 DPA10301-DPB15501 DPA10301-DPB16501 DPA10301-DPB17501 DPA10301-DPB18001 DPA10401-DPB10101 DPA10401-DPB10201; note = HLAs: DPA10401-DPB10202 DPA10401-DPB10402 DPA10401-DPB10501 DPA10401-DPB110501 DPA10401-DPB14901
PPILWTGYELLPDK

SEQ ID NO: 6609 - protein, 14 aa, synthetic construct
  source 1..14: note = Seed: PPFLWMGYELHPDK; note = HLAs: DPA10103-DPB10101 DPA10103-DPB10201 DPA10103-DPB10202 DPA10103-DPB10401 DPA10103-DPB112601 DPA10103-DPB11501 DPA10103-DPB11601 DPA10103-DPB11901 DPA10103-DPB12301 DPA10103-DPB13101 DPA10103-DPB13401 DPA10103-DPB13901 DPA10103-DPB14001 DPA10103-DPB14101 DPA10103-DPB14801 DPA10103-DPB15001 DPA10103-DPB15901 DPA10104-DPB10101 DPA10104-DPB11501 DPA10105-DPB10101 DPA10105-DPB10401 DPA10105-DPB15001 DPA10106-DPB10101 DPA10201-DPB10101 DPA10201-DPB110601 DPA10201-DPB11501 DPA10201-DPB11601 DPA10201-DPB11901 DPA10202-DPB10101 DPA10202-DPB10201 DPA10202-DPB10202 DPA10202-DPB10401 DPA10202-DPB110601 DPA10202-DPB11901 DPA10202-DPB13101 DPA10202-DPB16501 DPA10301-DPB10101 DPA10301-DPB10201 DPA10301-DPB10202 DPA10301-DPB10401 DPA10301-DPB10402 DPA10301-DPB110501 DPA10301-DPB110601 DPA10301-DPB11801 DPA10301-DPB12301 DPA10301-DPB13901 DPA10301-DPB14001 DPA10301-DPB14901 DPA10301-DPB15501 DPA10301-DPB16501 DPA10301-DPB17501 DPA10301-DPB18001 DPA10401-DPB10101 DPA10401-DPB10201; note = HLAs: DPA10401-DPB10202 DPA10401-DPB10402 DPA10401-DPB10501 DPA10401-DPB110501 DPA10401-DPB14901
PPFLWHGWELIPDK

SEQ ID NO: 6610 - protein, 20 aa, synthetic construct
  source 1..20: note = Seed: KEPPFLWMGYELHPDKWTVQ; note = HLAs: DPA10103-DPB10101 DPA10103-DPB10201 DPA10103-DPB10202 DPA10103-DPB10401 DPA10103-DPB10402 DPA10103-DPB10501 DPA10103-DPB110501 DPA10103-DPB112601 DPA10103-DPB11501 DPA10103-DPB11601 DPA10103-DPB11801 DPA10103-DPB11901 DPA10103-DPB12301 DPA10103-DPB13101 DPA10103-DPB13401 DPA10103-DPB13901 DPA10103-DPB14001 DPA10103-DPB14101 DPA10103-DPB14801 DPA10103-DPB14901 DPA10103-DPB15001 DPA10103-DPB15101 DPA10103-DPB15501 DPA10103-DPB15901 DPA10103-DPB18001 DPA10104-DPB10101 DPA10104-DPB11501 DPA10105-DPB10101 DPA10105-DPB10401 DPA10105-DPB11801 DPA10105-DPB15001 DPA10106-DPB10101 DPA10201-DPB10101 DPA10201-DPB10201 DPA10201-DPB10202 DPA10201-DPB10401 DPA10201-DPB10501 DPA10201-DPB110601 DPA10201-DPB11501 DPA10201-DPB11601 DPA10201-DPB11901 DPA10201-DPB13401 DPA10201-DPB15501 DPA10202-DPB10101 DPA10202-DPB10201 DPA10202-DPB10202 DPA10202-DPB10401 DPA10202-DPB10501 DPA10202-DPB110601 DPA10202-DPB11101 DPA10202-DPB11301 DPA10202-DPB11801 DPA10202-DPB11901 DPA10202-DPB13101 DPA10202-DPB13801; note = HLAs: DPA10202-DPB15501 DPA10202-DPB16501 DPA10301-DPB10101 DPA10301-DPB10201 DPA10301-DPB10202 DPA10301-DPB10401 DPA10301-DPB10402 DPA10301-DPB110501 DPA10301-DPB110601 DPA10301-DPB11101 DPA10301-DPB11301 DPA10301-DPB11801 DPA10301-DPB12301 DPA10301-DPB13901 DPA10301-DPB14001 DPA10301-DPB14901 DPA10301-DPB15501 DPA10301-DPB16501 DPA10301-DPB17501 DPA10301-DPB18001 DPA10401-DPB10101 DPA10401-DPB10201 DPA10401-DPB10202 DPA10401-DPB10402 DPA10401-DPB10501 DPA10401-DPB110501 DPA10401-DPB14901
KEPPFLWRGFELIPDKWTVQ

SEQ ID NO: 6611 - protein, 14 aa, synthetic construct
  source 1..14: note = Seed: PPFLWMGYELHPDK; note = HLAs: DPA10103-DPB10101 DPA10103-DPB10201 DPA10103-DPB10202 DPA10103-DPB10401 DPA10103-DPB112601 DPA10103-DPB11501 DPA10103-DPB11601 DPA10103-DPB11901 DPA10103-DPB12301 DPA10103-DPB13101 DPA10103-DPB13401 DPA10103-DPB13901 DPA10103-DPB14001 DPA10103-DPB14101 DPA10103-DPB14801 DPA10103-DPB15001 DPA10103-DPB15901 DPA10104-DPB10101 DPA10104-DPB11501 DPA10105-DPB10101 DPA10105-DPB10401 DPA10105-DPB15001 DPA10106-DPB10101 DPA10201-DPB10101 DPA10201-DPB110601 DPA10201-DPB11501 DPA10201-DPB11601 DPA10201-DPB11901 DPA10202-DPB10101 DPA10202-DPB10201 DPA10202-DPB10202 DPA10202-DPB10401 DPA10202-DPB110601 DPA10202-DPB11901 DPA10202-DPB13101 DPA10202-DPB16501 DPA10301-DPB10101 DPA10301-DPB10201 DPA10301-DPB10202 DPA10301-DPB10401 DPA10301-DPB10402 DPA10301-DPB110501 DPA10301-DPB110601 DPA10301-DPB11801 DPA10301-DPB12301 DPA10301-DPB13901 DPA10301-DPB14001 DPA10301-DPB14901 DPA10301-DPB16501 DPA10301-DPB17501 DPA10301-DPB18001 DPA10401-DPB10101 DPA10401-DPB10201 DPA10401-DPB10202; note = HLAs: DPA10401-DPB10402 DPA10401-DPB10501 DPA10401-DPB110501 DPA10401-DPB14901
PPMLWHGFELLPDK

SEQ ID NO: 6612 - protein, 14 aa, synthetic construct
  source 1..14: note = Seed: PPFLWMGYELHPDK; note = HLAs: DPA10103-DPB10101 DPA10103-DPB10201 DPA10103-DPB10202 DPA10103-DPB10401 DPA10103-DPB112601 DPA10103-DPB11501 DPA10103-DPB11601 DPA10103-DPB11901 DPA10103-DPB12301 DPA10103-DPB13101 DPA10103-DPB13401 DPA10103-DPB13901 DPA10103-DPB14001 DPA10103-DPB14101 DPA10103-DPB14801 DPA10103-DPB15001 DPA10103-DPB15901 DPA10104-DPB10101 DPA10104-DPB11501 DPA10105-DPB10101 DPA10105-DPB10401 DPA10105-DPB15001 DPA10106-DPB10101 DPA10201-DPB10101 DPA10201-DPB110601 DPA10201-DPB11501 DPA10201-DPB11601 DPA10201-DPB11901 DPA10202-DPB10101 DPA10202-DPB10201 DPA10202-DPB10202 DPA10202-DPB10401 DPA10202-DPB110601 DPA10202-DPB11901 DPA10202-DPB13101 DPA10202-DPB16501 DPA10301-DPB10101 DPA10301-DPB10201 DPA10301-DPB10202 DPA10301-DPB10401 DPA10301-DPB10402 DPA10301-DPB110501 DPA10301-DPB110601 DPA10301-DPB11801 DPA10301-DPB12301 DPA10301-DPB13901 DPA10301-DPB14001 DPA10301-DPB14901 DPA10301-DPB15501 DPA10301-DPB16501 DPA10301-DPB17501 DPA10301-DPB18001 DPA10401-DPB10101 DPA10401-DPB10201; note = HLAs: DPA10401-DPB10202 DPA10401-DPB10402 DPA10401-DPB10501 DPA10401-DPB110501 DPA10401-DPB14901
PPFLWHGLELVPDK

SEQ ID NO: 6613 - protein, 14 aa, synthetic construct
  source 1..14: note = Seed: PPFLWMGYELHPDK; note = HLAs: DPA10103-DPB10101 DPA10103-DPB10201 DPA10103-DPB10202 DPA10103-DPB10401 DPA10103-DPB112601 DPA10103-DPB11501 DPA10103-DPB11601 DPA10103-DPB11901 DPA10103-DPB12301 DPA10103-DPB13101 DPA10103-DPB13401 DPA10103-DPB13901 DPA10103-DPB14001 DPA10103-DPB14101 DPA10103-DPB14801 DPA10103-DPB15001 DPA10103-DPB15901 DPA10104-DPB10101 DPA10104-DPB11501 DPA10105-DPB10101 DPA10105-DPB10401 DPA10105-DPB15001 DPA10106-DPB10101 DPA10201-DPB10101 DPA10201-DPB110601 DPA10201-DPB11501 DPA10201-DPB11601 DPA10201-DPB11901 DPA10202-DPB10101 DPA10202-DPB10201 DPA10202-DPB10202 DPA10202-DPB10401 DPA10202-DPB110601 DPA10202-DPB11901 DPA10202-DPB13101 DPA10202-DPB16501 DPA10301-DPB10101 DPA10301-DPB10201 DPA10301-DPB10202 DPA10301-DPB10401 DPA10301-DPB10402 DPA10301-DPB110501 DPA10301-DPB110601 DPA10301-DPB11801 DPA10301-DPB12301 DPA10301-DPB13901 DPA10301-DPB14001 DPA10301-DPB14901 DPA10301-DPB15501 DPA10301-DPB16501 DPA10301-DPB17501 DPA10301-DPB18001 DPA10401-DPB10101 DPA10401-DPB10201; note = HLAs: DPA10401-DPB10202 DPA10401-DPB10402 DPA10401-DPB10501 DPA10401-DPB110501 DPA10401-DPB14901
PPILWNGFELVPDK

SEQ ID NO: 6614 - protein, 14 aa, synthetic construct
  source 1..14: note = Seed: PPFLWMGYELHPDK; note = HLAs: DRB1_1001 DPA10103-DPB10101 DPA10103-DPB10201 DPA10103-DPB10202 DPA10103-DPB10401 DPA10103-DPB112601 DPA10103-DPB11501 DPA10103-DPB11601 DPA10103-DPB11901 DPA10103-DPB12301 DPA10103-DPB13101 DPA10103-DPB13401 DPA10103-DPB13901 DPA10103-DPB14001 DPA10103-DPB14101 DPA10103-DPB14801 DPA10103-DPB15001 DPA10103-DPB15901 DPA10104-DPB10101 DPA10104-DPB11501 DPA10105-DPB10101 DPA10105-DPB10401 DPA10105-DPB15001 DPA10106-DPB10101 DPA10201-DPB10101 DPA10201-DPB110601 DPA10201-DPB11501 DPA10201-DPB11601 DPA10201-DPB11901 DPA10202-DPB10101 DPA10202-DPB10201 DPA10202-DPB10202 DPA10202-DPB10401 DPA10202-DPB110601 DPA10202-DPB11901 DPA10202-DPB13101 DPA10202-DPB16501 DPA10301-DPB10101 DPA10301-DPB10201 DPA10301-DPB10202 DPA10301-DPB10401 DPA10301-DPB10402 DPA10301-DPB110501 DPA10301-DPB110601 DPA10301-DPB11801 DPA10301-DPB12301 DPA10301-DPB13901 DPA10301-DPB14001 DPA10301-DPB14901 DPA10301-DPB15501 DPA10301-DPB16501 DPA10301-DPB17501 DPA10301-DPB18001 DPA10401-DPB10101 DPA10401-DPB10201; note = HLAs: DPA10401-DPB10202 DPA10401-DPB10402 DPA10401-DPB10501 DPA10401-DPB110501 DPA10401-DPB14901
PPFLWIGLELLPDK

SEQ ID NO: 6615 - protein, 20 aa, synthetic construct
  source 1..20: note = Seed: KEPPFLWMGYELHPDKWTVQ; note = HLAs: DPA10103-DPB10101 DPA10103-DPB10201 DPA10103-DPB10202 DPA10103-DPB10401 DPA10103-DPB10402 DPA10103-DPB10501 DPA10103-DPB110501 DPA10103-DPB112601 DPA10103-DPB11501 DPA10103-DPB11601 DPA10103-DPB11801 DPA10103-DPB11901 DPA10103-DPB12301 DPA10103-DPB13101 DPA10103-DPB13401 DPA10103-DPB13901 DPA10103-DPB14001 DPA10103-DPB14101 DPA10103-DPB14801 DPA10103-DPB14901 DPA10103-DPB15001 DPA10103-DPB15101 DPA10103-DPB15501 DPA10103-DPB15901 DPA10103-DPB18001 DPA10104-DPB10101 DPA10104-DPB11501 DPA10105-DPB10101 DPA10105-DPB10401 DPA10105-DPB11801 DPA10105-DPB15001 DPA10106-DPB10101 DPA10201-DPB10101 DPA10201-DPB10201 DPA10201-DPB10202 DPA10201-DPB10401 DPA10201-DPB10501 DPA10201-DPB110601 DPA10201-DPB11501 DPA10201-DPB11601 DPA10201-DPB11901 DPA10201-DPB13401 DPA10201-DPB15501 DPA10202-DPB10101 DPA10202-DPB10201 DPA10202-DPB10202 DPA10202-DPB10401 DPA10202-DPB10501 DPA10202-DPB110601 DPA10202-DPB11101 DPA10202-DPB11301 DPA10202-DPB11801 DPA10202-DPB11901 DPA10202-DPB13101 DPA10202-DPB13801; note = HLAs: DPA10202-DPB15501 DPA10202-DPB16501 DPA10301-DPB10101 DPA10301-DPB10201 DPA10301-DPB10202 DPA10301-DPB10401 DPA10301-DPB10402 DPA10301-DPB110501 DPA10301-DPB110601 DPA10301-DPB11101 DPA10301-DPB11301 DPA10301-DPB11801 DPA10301-DPB12301 DPA10301-DPB13901 DPA10301-DPB14001 DPA10301-DPB14901 DPA10301-DPB15501 DPA10301-DPB16501 DPA10301-DPB17501 DPA10301-DPB18001 DPA10401-DPB10101 DPA10401-DPB10201 DPA10401-DPB10202 DPA10401-DPB10402 DPA10401-DPB10501 DPA10401-DPB110501 DPA10401-DPB14901
KEPPLLWQGFELIPDKWTVQ

SEQ ID NO: 6616 - protein, 14 aa, synthetic construct
  source 1..14: note = Seed: PPFLWMGYELHPDK; note = HLAs: DRB1_1001 DPA10103-DPB10101 DPA10103-DPB10201 DPA10103-DPB10202 DPA10103-DPB10401 DPA10103-DPB112601 DPA10103-DPB11501 DPA10103-DPB11601 DPA10103-DPB11901 DPA10103-DPB12301 DPA10103-DPB13101 DPA10103-DPB13401 DPA10103-DPB13901 DPA10103-DPB14001 DPA10103-DPB14101 DPA10103-DPB14801 DPA10103-DPB15001 DPA10103-DPB15901 DPA10104-DPB10101 DPA10104-DPB11501 DPA10105-DPB10101 DPA10105-DPB10401 DPA10105-DPB15001 DPA10106-DPB10101 DPA10201-DPB10101 DPA10201-DPB110601 DPA10201-DPB11501 DPA10201-DPB11601 DPA10201-DPB11901 DPA10202-DPB10101 DPA10202-DPB10201 DPA10202-DPB10202 DPA10202-DPB10401 DPA10202-DPB110601 DPA10202-DPB11901 DPA10202-DPB13101 DPA10202-DPB16501 DPA10301-DPB10101 DPA10301-DPB10201 DPA10301-DPB10202 DPA10301-DPB10401 DPA10301-DPB10402 DPA10301-DPB110501 DPA10301-DPB110601 DPA10301-DPB11801 DPA10301-DPB12301 DPA10301-DPB13901 DPA10301-DPB14001 DPA10301-DPB14901 DPA10301-DPB15501 DPA10301-DPB16501 DPA10301-DPB17501 DPA10301-DPB18001 DPA10401-DPB10101 DPA10401-DPB10201; note = HLAs: DPA10401-DPB10202 DPA10401-DPB10402 DPA10401-DPB10501 DPA10401-DPB110501 DPA10401-DPB14901
PPFLWQGYELVPDK

SEQ ID NO: 6617 - protein, 20 aa, synthetic construct
  source 1..20: note = Seed: KEPPFLWMGYELHPDKWTVQ; note = HLAs: DRB1_0101 DPA10103-DPB10101 DPA10103-DPB10201 DPA10103-DPB10202 DPA10103-DPB10401 DPA10103-DPB10402 DPA10103-DPB10501 DPA10103-DPB110501 DPA10103-DPB112601 DPA10103-DPB11501 DPA10103-DPB11601 DPA10103-DPB11801 DPA10103-DPB11901 DPA10103-DPB12301 DPA10103-DPB13101 DPA10103-DPB13401 DPA10103-DPB13901 DPA10103-DPB14001 DPA10103-DPB14101 DPA10103-DPB14801 DPA10103-DPB14901 DPA10103-DPB15001 DPA10103-DPB15101 DPA10103-DPB15501 DPA10103-DPB15901 DPA10103-DPB18001 DPA10104-DPB10101 DPA10104-DPB11501 DPA10105-DPB10101 DPA10105-DPB10401 DPA10105-DPB11801 DPA10105-DPB15001 DPA10106-DPB10101 DPA10201-DPB10101 DPA10201-DPB10201 DPA10201-DPB10202 DPA10201-DPB10401 DPA10201-DPB10501 DPA10201-DPB110601 DPA10201-DPB11501 DPA10201-DPB11601 DPA10201-DPB11901 DPA10201-DPB13401 DPA10201-DPB15501 DPA10202-DPB10101 DPA10202-DPB10201 DPA10202-DPB10202 DPA10202-DPB10401 DPA10202-DPB10501 DPA10202-DPB110601 DPA10202-DPB11101 DPA10202-DPB11301 DPA10202-DPB11801 DPA10202-DPB11901 DPA10202-DPB13101; note = HLAs: DPA10202-DPB13801 DPA10202-DPB15501 DPA10202-DPB16501 DPA10301-DPB10101 DPA10301-DPB10201 DPA10301-DPB10202 DPA10301-DPB10401 DPA10301-DPB10402 DPA10301-DPB110501 DPA10301-DPB110601 DPA10301-DPB11101 DPA10301-DPB11301 DPA10301-DPB11801 DPA10301-DPB12301 DPA10301-DPB13901 DPA10301-DPB14001 DPA10301-DPB14901 DPA10301-DPB15501 DPA10301-DPB16501 DPA10301-DPB17501 DPA10301-DPB18001 DPA10401-DPB10101 DPA10401-DPB10201 DPA10401-DPB10202 DPA10401-DPB10402 DPA10401-DPB10501 DPA10401-DPB110501 DPA10401-DPB14901
KEPPFLWWGFELVPDKWTVQ

SEQ ID NO: 6618 - protein, 14 aa, synthetic construct
  source 1..14: note = Seed: PPFLWMGYELHPDK; note = HLAs: DPA10103-DPB10101 DPA10103-DPB10201 DPA10103-DPB10202 DPA10103-DPB10401 DPA10103-DPB112601 DPA10103-DPB11501 DPA10103-DPB11601 DPA10103-DPB11901 DPA10103-DPB12301 DPA10103-DPB13101 DPA10103-DPB13401 DPA10103-DPB13901 DPA10103-DPB14001 DPA10103-DPB14101 DPA10103-DPB14801 DPA10103-DPB15001 DPA10103-DPB15901 DPA10104-DPB10101 DPA10104-DPB11501 DPA10105-DPB10101 DPA10105-DPB10401 DPA10105-DPB15001 DPA10106-DPB10101 DPA10201-DPB10101 DPA10201-DPB110601 DPA10201-DPB11501 DPA10201-DPB11601 DPA10201-DPB11901 DPA10202-DPB10101 DPA10202-DPB10201 DPA10202-DPB10202 DPA10202-DPB10401 DPA10202-DPB110601 DPA10202-DPB11901 DPA10202-DPB13101 DPA10202-DPB16501 DPA10301-DPB10101 DPA10301-DPB10201 DPA10301-DPB10202 DPA10301-DPB10401 DPA10301-DPB10402 DPA10301-DPB110501 DPA10301-DPB110601 DPA10301-DPB11801 DPA10301-DPB12301 DPA10301-DPB13901 DPA10301-DPB14001 DPA10301-DPB14901 DPA10301-DPB15501 DPA10301-DPB16501 DPA10301-DPB17501 DPA10301-DPB18001 DPA10401-DPB10101 DPA10401-DPB10201; note = HLAs: DPA10401-DPB10202 DPA10401-DPB10402 DPA10401-DPB10501 DPA10401-DPB110501 DPA10401-DPB14901
PPILWAGFELMPDK

SEQ ID NO: 6619 - protein, 14 aa, synthetic construct
  source 1..14: note = Seed: PPFLWMGYELHPDK; note = HLAs: DPA10103-DPB10101 DPA10103-DPB10201 DPA10103-DPB10202 DPA10103-DPB10401 DPA10103-DPB112601 DPA10103-DPB11501 DPA10103-DPB11601 DPA10103-DPB11901 DPA10103-DPB12301 DPA10103-DPB13101 DPA10103-DPB13401 DPA10103-DPB13901 DPA10103-DPB14001 DPA10103-DPB14101 DPA10103-DPB14801 DPA10103-DPB15001 DPA10103-DPB15901 DPA10104-DPB10101 DPA10104-DPB11501 DPA10105-DPB10101 DPA10105-DPB10401 DPA10105-DPB15001 DPA10106-DPB10101 DPA10201-DPB10101 DPA10201-DPB110601 DPA10201-DPB11501 DPA10201-DPB11601 DPA10201-DPB11901 DPA10202-DPB10101 DPA10202-DPB10201 DPA10202-DPB10202 DPA10202-DPB10401 DPA10202-DPB110601 DPA10202-DPB11901 DPA10202-DPB13101 DPA10202-DPB16501 DPA10301-DPB10101 DPA10301-DPB10201 DPA10301-DPB10202 DPA10301-DPB10401 DPA10301-DPB10402 DPA10301-DPB110501 DPA10301-DPB110601 DPA10301-DPB11801 DPA10301-DPB12301 DPA10301-DPB13901 DPA10301-DPB14001 DPA10301-DPB14901 DPA10301-DPB15501 DPA10301-DPB16501 DPA10301-DPB17501 DPA10301-DPB18001 DPA10401-DPB10101 DPA10401-DPB10201; note = HLAs: DPA10401-DPB10202 DPA10401-DPB10402 DPA10401-DPB10501 DPA10401-DPB110501 DPA10401-DPB14901
PPFLWAGFELHPDK

SEQ ID NO: 6620 - protein, 14 aa, synthetic construct
  source 1..14: note = Seed: PPFLWMGYELHPDK; note = HLAs: DPA10103-DPB10101 DPA10103-DPB10201 DPA10103-DPB10202 DPA10103-DPB10401 DPA10103-DPB112601 DPA10103-DPB11501 DPA10103-DPB11601 DPA10103-DPB11901 DPA10103-DPB12301 DPA10103-DPB13101 DPA10103-DPB13401 DPA10103-DPB13901 DPA10103-DPB14001 DPA10103-DPB14101 DPA10103-DPB14801 DPA10103-DPB15001 DPA10103-DPB15901 DPA10104-DPB10101 DPA10104-DPB11501 DPA10105-DPB10101 DPA10105-DPB10401 DPA10105-DPB15001 DPA10106-DPB10101 DPA10201-DPB10101 DPA10201-DPB110601 DPA10201-DPB11501 DPA10201-DPB11601 DPA10201-DPB11901 DPA10202-DPB10101 DPA10202-DPB10201 DPA10202-DPB10202 DPA10202-DPB10401 DPA10202-DPB110601 DPA10202-DPB11901 DPA10202-DPB13101 DPA10202-DPB16501 DPA10301-DPB10101 DPA10301-DPB10201 DPA10301-DPB10202 DPA10301-DPB10401 DPA10301-DPB10402 DPA10301-DPB110501 DPA10301-DPB110601 DPA10301-DPB11801 DPA10301-DPB12301 DPA10301-DPB13901 DPA10301-DPB14001 DPA10301-DPB14901 DPA10301-DPB15501 DPA10301-DPB16501 DPA10301-DPB17501 DPA10301-DPB18001 DPA10401-DPB10101 DPA10401-DPB10201; note = HLAs: DPA10401-DPB10202 DPA10401-DPB10402 DPA10401-DPB10501 DPA10401-DPB110501 DPA10401-DPB14901
PPFLWTGMELIPDK

SEQ ID NO: 6621 - protein, 20 aa, synthetic construct
  source 1..20: note = Seed: KEPPFLWMGYELHPDKWTVQ; note = HLAs: DRB1_0101 DPA10103-DPB10101 DPA10103-DPB10201 DPA10103-DPB10202 DPA10103-DPB10401 DPA10103-DPB10402 DPA10103-DPB10501 DPA10103-DPB110501 DPA10103-DPB112601 DPA10103-DPB11501 DPA10103-DPB11601 DPA10103-DPB11801 DPA10103-DPB11901 DPA10103-DPB12301 DPA10103-DPB13101 DPA10103-DPB13401 DPA10103-DPB13901 DPA10103-DPB14001 DPA10103-DPB14101 DPA10103-DPB14801 DPA10103-DPB14901 DPA10103-DPB15001 DPA10103-DPB15101 DPA10103-DPB15501 DPA10103-DPB15901 DPA10103-DPB18001 DPA10104-DPB10101 DPA10104-DPB11501 DPA10105-DPB10101 DPA10105-DPB10401 DPA10105-DPB11801 DPA10105-DPB15001 DPA10106-DPB10101 DPA10201-DPB10101 DPA10201-DPB10201 DPA10201-DPB10202 DPA10201-DPB10401 DPA10201-DPB10501 DPA10201-DPB110601 DPA10201-DPB11501 DPA10201-DPB11601 DPA10201-DPB11901 DPA10201-DPB13401 DPA10201-DPB15501 DPA10202-DPB10101 DPA10202-DPB10201 DPA10202-DPB10202 DPA10202-DPB10401 DPA10202-DPB10501 DPA10202-DPB110601 DPA10202-DPB11101 DPA10202-DPB11301 DPA10202-DPB11801 DPA10202-DPB11901 DPA10202-DPB13101; note = HLAs: DPA10202-DPB13801 DPA10202-DPB15501 DPA10202-DPB16501 DPA10301-DPB10101 DPA10301-DPB10201 DPA10301-DPB10202 DPA10301-DPB10401 DPA10301-DPB10402 DPA10301-DPB110501 DPA10301-DPB110601 DPA10301-DPB11101 DPA10301-DPB11301 DPA10301-DPB11801 DPA10301-DPB12301 DPA10301-DPB13901 DPA10301-DPB14001 DPA10301-DPB14901 DPA10301-DPB15501 DPA10301-DPB16501 DPA10301-DPB17501 DPA10301-DPB18001 DPA10401-DPB10101 DPA10401-DPB10201 DPA10401-DPB10202 DPA10401-DPB10402 DPA10401-DPB10501 DPA10401-DPB110501 DPA10401-DPB14901
KEPPFLWHGIELIPDKWTVQ

SEQ ID NO: 6622 - protein, 14 aa, synthetic construct
  source 1..14: note = Seed: PPFLWMGYELHPDK; note = HLAs: DRB1_1001 DPA10103-DPB10201 DPA10103-DPB10202 DPA10103-DPB10401 DPA10103-DPB112601 DPA10103-DPB11501 DPA10103-DPB11601 DPA10103-DPB11901 DPA10103-DPB12301 DPA10103-DPB13401 DPA10103-DPB13901 DPA10103-DPB14001 DPA10103-DPB14101 DPA10103-DPB14801 DPA10103-DPB15901 DPA10104-DPB11501 DPA10105-DPB10401 DPA10106-DPB10101 DPA10201-DPB10101 DPA10201-DPB110601 DPA10201-DPB11501 DPA10201-DPB11601 DPA10201-DPB11901 DPA10202-DPB10101 DPA10202-DPB10201 DPA10202-DPB10202 DPA10202-DPB110601 DPA10202-DPB11901 DPA10202-DPB16501 DPA10301-DPB10201 DPA10301-DPB10202 DPA10301-DPB10401 DPA10301-DPB10402 DPA10301-DPB110501 DPA10301-DPB110601 DPA10301-DPB11801 DPA10301-DPB12301 DPA10301-DPB13901 DPA10301-DPB14001 DPA10301-DPB14901 DPA10301-DPB15501 DPA10301-DPB17501 DPA10301-DPB18001 DPA10401-DPB10201 DPA10401-DPB10202 DPA10401-DPB10402 DPA10401-DPB110501 DPA10401-DPB14901
PPFLWVGIELLPDK

SEQ ID NO: 6623 - protein, 14 aa, synthetic construct
  source 1..14: note = Seed: PPFLWMGYELHPDK; note = HLAs: DPA10103-DPB10101 DPA10103-DPB10201 DPA10103-DPB10202 DPA10103-DPB10401 DPA10103-DPB112601 DPA10103-DPB11501 DPA10103-DPB11601 DPA10103-DPB11901 DPA10103-DPB12301 DPA10103-DPB13101 DPA10103-DPB13401 DPA10103-DPB13901 DPA10103-DPB14001 DPA10103-DPB14101 DPA10103-DPB14801 DPA10103-DPB15001 DPA10103-DPB15901 DPA10104-DPB10101 DPA10104-DPB11501 DPA10105-DPB10101 DPA10105-DPB10401 DPA10105-DPB15001 DPA10106-DPB10101 DPA10201-DPB10101 DPA10201-DPB110601 DPA10201-DPB11501 DPA10201-DPB11601 DPA10201-DPB11901 DPA10202-DPB10101 DPA10202-DPB10201 DPA10202-DPB10202 DPA10202-DPB10401 DPA10202-DPB110601 DPA10202-DPB11901 DPA10202-DPB13101 DPA10202-DPB16501 DPA10301-DPB10101 DPA10301-DPB10201 DPA10301-DPB10202 DPA10301-DPB10401 DPA10301-DPB10402 DPA10301-DPB110501 DPA10301-DPB110601 DPA10301-DPB11801 DPA10301-DPB12301 DPA10301-DPB13901 DPA10301-DPB14001 DPA10301-DPB14901 DPA10301-DPB15501 DPA10301-DPB16501 DPA10301-DPB17501 DPA10301-DPB18001 DPA10401-DPB10101 DPA10401-DPB10201; note = HLAs: DPA10401-DPB10202 DPA10401-DPB10402 DPA10401-DPB10501 DPA10401-DPB110501 DPA10401-DPB14901
PPLLWIGFELMPDK

SEQ ID NO: 6624 - protein, 20 aa, synthetic construct
  source 1..20: note = Seed: KEPPFLWMGYELHPDKWTVQ; note = HLAs: DPA10103-DPB10101 DPA10103-DPB10201 DPA10103-DPB10202 DPA10103-DPB10401 DPA10103-DPB10402 DPA10103-DPB10501 DPA10103-DPB110501 DPA10103-DPB112601 DPA10103-DPB11501 DPA10103-DPB11601 DPA10103-DPB11801 DPA10103-DPB11901 DPA10103-DPB12301 DPA10103-DPB13101 DPA10103-DPB13401 DPA10103-DPB13901 DPA10103-DPB14001 DPA10103-DPB14101 DPA10103-DPB14801 DPA10103-DPB14901 DPA10103-DPB15001 DPA10103-DPB15101 DPA10103-DPB15501 DPA10103-DPB15901 DPA10103-DPB18001 DPA10104-DPB10101 DPA10104-DPB11501 DPA10105-DPB10101 DPA10105-DPB10401 DPA10105-DPB11801 DPA10105-DPB15001 DPA10106-DPB10101 DPA10201-DPB10101 DPA10201-DPB10201 DPA10201-DPB10202 DPA10201-DPB10401 DPA10201-DPB10501 DPA10201-DPB110601 DPA10201-DPB11501 DPA10201-DPB11601 DPA10201-DPB11901 DPA10201-DPB13401 DPA10201-DPB15501 DPA10202-DPB10101 DPA10202-DPB10201 DPA10202-DPB10202 DPA10202-DPB10401 DPA10202-DPB10501 DPA10202-DPB110601 DPA10202-DPB11101 DPA10202-DPB11301 DPA10202-DPB11801 DPA10202-DPB11901 DPA10202-DPB13101 DPA10202-DPB13801; note = HLAs: DPA10202-DPB15501 DPA10202-DPB16501 DPA10301-DPB10101 DPA10301-DPB10201 DPA10301-DPB10202 DPA10301-DPB10401 DPA10301-DPB10402 DPA10301-DPB110501 DPA10301-DPB110601 DPA10301-DPB11301 DPA10301-DPB11801 DPA10301-DPB12301 DPA10301-DPB13901 DPA10301-DPB14001 DPA10301-DPB14901 DPA10301-DPB16501 DPA10301-DPB17501 DPA10301-DPB18001 DPA10401-DPB10101 DPA10401-DPB10201 DPA10401-DPB10202 DPA10401-DPB10402 DPA10401-DPB10501 DPA10401-DPB110501 DPA10401-DPB14901
KEPPMLWHGFELLPDKWTVQ

SEQ ID NO: 6625 - protein, 14 aa, synthetic construct
  source 1..14: note = Seed: PPFLWMGYELHPDK; note = HLAs: DPA10103-DPB10101 DPA10103-DPB10201 DPA10103-DPB10202 DPA10103-DPB10401 DPA10103-DPB112601 DPA10103-DPB11501 DPA10103-DPB11601 DPA10103-DPB11901 DPA10103-DPB12301 DPA10103-DPB13101 DPA10103-DPB13401 DPA10103-DPB13901 DPA10103-DPB14001 DPA10103-DPB14101 DPA10103-DPB14801 DPA10103-DPB15001 DPA10103-DPB15901 DPA10104-DPB10101 DPA10104-DPB11501 DPA10105-DPB10101 DPA10105-DPB10401 DPA10105-DPB15001 DPA10106-DPB10101 DPA10201-DPB10101 DPA10201-DPB110601 DPA10201-DPB11501 DPA10201-DPB11601 DPA10201-DPB11901 DPA10202-DPB10101 DPA10202-DPB10201 DPA10202-DPB10202 DPA10202-DPB10401 DPA10202-DPB110601 DPA10202-DPB11901 DPA10202-DPB13101 DPA10202-DPB16501 DPA10301-DPB10101 DPA10301-DPB10201 DPA10301-DPB10202 DPA10301-DPB10401 DPA10301-DPB10402 DPA10301-DPB110501 DPA10301-DPB110601 DPA10301-DPB11801 DPA10301-DPB12301 DPA10301-DPB13901 DPA10301-DPB14001 DPA10301-DPB14901 DPA10301-DPB15501 DPA10301-DPB16501 DPA10301-DPB17501 DPA10301-DPB18001 DPA10401-DPB10101 DPA10401-DPB10201; note = HLAs: DPA10401-DPB10202 DPA10401-DPB10402 DPA10401-DPB10501 DPA10401-DPB110501 DPA10401-DPB14901
PPFLWNGFELTPDK

SEQ ID NO: 6626 - protein, 20 aa, synthetic construct
  source 1..20: note = Seed: KEPPFLWMGYELHPDKWTVQ; note = HLAs: DPA10103-DPB10101 DPA10103-DPB10201 DPA10103-DPB10202 DPA10103-DPB10401 DPA10103-DPB10402 DPA10103-DPB10501 DPA10103-DPB110501 DPA10103-DPB112601 DPA10103-DPB11501 DPA10103-DPB11601 DPA10103-DPB11801 DPA10103-DPB11901 DPA10103-DPB12301 DPA10103-DPB13101 DPA10103-DPB13401 DPA10103-DPB13901 DPA10103-DPB14001 DPA10103-DPB14101 DPA10103-DPB14801 DPA10103-DPB14901 DPA10103-DPB15001 DPA10103-DPB15101 DPA10103-DPB15501 DPA10103-DPB15901 DPA10103-DPB18001 DPA10104-DPB10101 DPA10104-DPB11501 DPA10105-DPB10101 DPA10105-DPB10401 DPA10105-DPB11801 DPA10105-DPB15001 DPA10106-DPB10101 DPA10201-DPB10101 DPA10201-DPB10201 DPA10201-DPB10202 DPA10201-DPB10401 DPA10201-DPB10501 DPA10201-DPB110601 DPA10201-DPB11501 DPA10201-DPB11601 DPA10201-DPB11901 DPA10201-DPB13401 DPA10201-DPB15501 DPA10202-DPB10101 DPA10202-DPB10201 DPA10202-DPB10202 DPA10202-DPB10401 DPA10202-DPB10501 DPA10202-DPB110601 DPA10202-DPB11101 DPA10202-DPB11301 DPA10202-DPB11801 DPA10202-DPB11901 DPA10202-DPB13101 DPA10202-DPB13801; note = HLAs: DPA10202-DPB15501 DPA10202-DPB16501 DPA10301-DPB10101 DPA10301-DPB10201 DPA10301-DPB10202 DPA10301-DPB10401 DPA10301-DPB10402 DPA10301-DPB110501 DPA10301-DPB110601 DPA10301-DPB11301 DPA10301-DPB11801 DPA10301-DPB12301 DPA10301-DPB13901 DPA10301-DPB14001 DPA10301-DPB14901 DPA10301-DPB15501 DPA10301-DPB16501 DPA10301-DPB17501 DPA10301-DPB18001 DPA10401-DPB10101 DPA10401-DPB10201 DPA10401-DPB10202 DPA10401-DPB10402 DPA10401-DPB10501 DPA10401-DPB110501 DPA10401-DPB14901
KEPPILWQGFELLPDKWTVQ

SEQ ID NO: 6627 - protein, 20 aa, synthetic construct
  source 1..20: note = Seed: KEPPFLWMGYELHPDKWTVQ; note = HLAs: DPA10103-DPB10101 DPA10103-DPB10201 DPA10103-DPB10202 DPA10103-DPB10401 DPA10103-DPB10402 DPA10103-DPB10501 DPA10103-DPB110501 DPA10103-DPB112601 DPA10103-DPB11501 DPA10103-DPB11601 DPA10103-DPB11801 DPA10103-DPB11901 DPA10103-DPB12301 DPA10103-DPB13101 DPA10103-DPB13401 DPA10103-DPB13901 DPA10103-DPB14001 DPA10103-DPB14101 DPA10103-DPB14801 DPA10103-DPB14901 DPA10103-DPB15001 DPA10103-DPB15101 DPA10103-DPB15501 DPA10103-DPB15901 DPA10103-DPB18001 DPA10104-DPB10101 DPA10104-DPB11501 DPA10105-DPB10101 DPA10105-DPB10401 DPA10105-DPB11801 DPA10105-DPB15001 DPA10106-DPB10101 DPA10201-DPB10101 DPA10201-DPB10201 DPA10201-DPB10202 DPA10201-DPB10401 DPA10201-DPB10501 DPA10201-DPB110601 DPA10201-DPB11501 DPA10201-DPB11601 DPA10201-DPB11901 DPA10201-DPB13401 DPA10201-DPB15501 DPA10202-DPB10101 DPA10202-DPB10201 DPA10202-DPB10202 DPA10202-DPB10401 DPA10202-DPB10501 DPA10202-DPB110601 DPA10202-DPB11101 DPA10202-DPB11301 DPA10202-DPB11801 DPA10202-DPB11901 DPA10202-DPB13101 DPA10202-DPB13801; note = HLAs: DPA10202-DPB15501 DPA10202-DPB16501 DPA10301-DPB10101 DPA10301-DPB10201 DPA10301-DPB10202 DPA10301-DPB10401 DPA10301-DPB10402 DPA10301-DPB110501 DPA10301-DPB110601 DPA10301-DPB11101 DPA10301-DPB11301 DPA10301-DPB11801 DPA10301-DPB12301 DPA10301-DPB13901 DPA10301-DPB14001 DPA10301-DPB14901 DPA10301-DPB15501 DPA10301-DPB16501 DPA10301-DPB17501 DPA10301-DPB18001 DPA10401-DPB10101 DPA10401-DPB10201 DPA10401-DPB10202 DPA10401-DPB10402 DPA10401-DPB10501 DPA10401-DPB110501 DPA10401-DPB14901
KEPPFLWFGFELMPDKWTVQ

SEQ ID NO: 6628 - protein, 14 aa, synthetic construct
  source 1..14: note = Seed: PPFLWMGYELHPDK; note = HLAs: DPA10103-DPB10101 DPA10103-DPB10201 DPA10103-DPB10202 DPA10103-DPB10401 DPA10103-DPB112601 DPA10103-DPB11501 DPA10103-DPB11601 DPA10103-DPB11901 DPA10103-DPB12301 DPA10103-DPB13101 DPA10103-DPB13401 DPA10103-DPB13901 DPA10103-DPB14001 DPA10103-DPB14101 DPA10103-DPB14801 DPA10103-DPB15001 DPA10103-DPB15901 DPA10104-DPB10101 DPA10104-DPB11501 DPA10105-DPB10101 DPA10105-DPB10401 DPA10105-DPB15001 DPA10106-DPB10101 DPA10201-DPB10101 DPA10201-DPB110601 DPA10201-DPB11501 DPA10201-DPB11601 DPA10201-DPB11901 DPA10202-DPB10101 DPA10202-DPB10201 DPA10202-DPB10202 DPA10202-DPB10401 DPA10202-DPB110601 DPA10202-DPB11901 DPA10202-DPB13101 DPA10202-DPB16501 DPA10301-DPB10101 DPA10301-DPB10201 DPA10301-DPB10202 DPA10301-DPB10401 DPA10301-DPB10402 DPA10301-DPB110501 DPA10301-DPB110601 DPA10301-DPB11801 DPA10301-DPB12301 DPA10301-DPB13901 DPA10301-DPB14001 DPA10301-DPB14901 DPA10301-DPB15501 DPA10301-DPB16501 DPA10301-DPB17501 DPA10301-DPB18001 DPA10401-DPB10101 DPA10401-DPB10201; note = HLAs: DPA10401-DPB10202 DPA10401-DPB10402 DPA10401-DPB10501 DPA10401-DPB110501 DPA10401-DPB14901
PPFLWHGFELNPDK

SEQ ID NO: 6629 - protein, 14 aa, synthetic construct
  source 1..14: note = Seed: PPFLWMGYELHPDK; note = HLAs: DPA10103-DPB10101 DPA10103-DPB10201 DPA10103-DPB10202 DPA10103-DPB10401 DPA10103-DPB112601 DPA10103-DPB11501 DPA10103-DPB11601 DPA10103-DPB11901 DPA10103-DPB12301 DPA10103-DPB13101 DPA10103-DPB13401 DPA10103-DPB13901 DPA10103-DPB14001 DPA10103-DPB14101 DPA10103-DPB14801 DPA10103-DPB15001 DPA10103-DPB15901 DPA10104-DPB10101 DPA10104-DPB11501 DPA10105-DPB10101 DPA10105-DPB10401 DPA10105-DPB15001 DPA10106-DPB10101 DPA10201-DPB10101 DPA10201-DPB110601 DPA10201-DPB11501 DPA10201-DPB11601 DPA10201-DPB11901 DPA10202-DPB10101 DPA10202-DPB10201 DPA10202-DPB10202 DPA10202-DPB10401 DPA10202-DPB110601 DPA10202-DPB11901 DPA10202-DPB13101 DPA10202-DPB16501 DPA10301-DPB10101 DPA10301-DPB10201 DPA10301-DPB10202 DPA10301-DPB10401 DPA10301-DPB10402 DPA10301-DPB110501 DPA10301-DPB110601 DPA10301-DPB11801 DPA10301-DPB12301 DPA10301-DPB13901 DPA10301-DPB14001 DPA10301-DPB14901 DPA10301-DPB16501 DPA10301-DPB17501 DPA10301-DPB18001 DPA10401-DPB10101 DPA10401-DPB10201 DPA10401-DPB10202; note = HLAs: DPA10401-DPB10402 DPA10401-DPB10501 DPA10401-DPB110501 DPA10401-DPB14901
PPVLWEGFELLPDK

SEQ ID NO: 6630 - protein, 14 aa, synthetic construct
  source 1..14: note = Seed: PPFLWMGYELHPDK; note = HLAs: DPA10103-DPB10101 DPA10103-DPB10201 DPA10103-DPB10202 DPA10103-DPB10401 DPA10103-DPB112601 DPA10103-DPB11501 DPA10103-DPB11601 DPA10103-DPB11901 DPA10103-DPB12301 DPA10103-DPB13101 DPA10103-DPB13401 DPA10103-DPB13901 DPA10103-DPB14001 DPA10103-DPB14101 DPA10103-DPB14801 DPA10103-DPB15001 DPA10103-DPB15901 DPA10104-DPB10101 DPA10104-DPB11501 DPA10105-DPB10101 DPA10105-DPB10401 DPA10105-DPB15001 DPA10106-DPB10101 DPA10201-DPB10101 DPA10201-DPB110601 DPA10201-DPB11501 DPA10201-DPB11601 DPA10201-DPB11901 DPA10202-DPB10101 DPA10202-DPB10201 DPA10202-DPB10202 DPA10202-DPB10401 DPA10202-DPB110601 DPA10202-DPB11901 DPA10202-DPB13101 DPA10202-DPB16501 DPA10301-DPB10101 DPA10301-DPB10201 DPA10301-DPB10202 DPA10301-DPB10401 DPA10301-DPB10402 DPA10301-DPB110501 DPA10301-DPB110601 DPA10301-DPB11801 DPA10301-DPB12301 DPA10301-DPB13901 DPA10301-DPB14001 DPA10301-DPB14901 DPA10301-DPB15501 DPA10301-DPB16501 DPA10301-DPB17501 DPA10301-DPB18001 DPA10401-DPB10101 DPA10401-DPB10201; note = HLAs: DPA10401-DPB10202 DPA10401-DPB10402 DPA10401-DPB10501 DPA10401-DPB110501 DPA10401-DPB14901
PPFLWVGLELLPDK

SEQ ID NO: 6631 - protein, 14 aa, synthetic construct
  source 1..14: note = Seed: PPFLWMGYELHPDK; note = HLAs: DPA10103-DPB10101 DPA10103-DPB10201 DPA10103-DPB10202 DPA10103-DPB10401 DPA10103-DPB112601 DPA10103-DPB11501 DPA10103-DPB11601 DPA10103-DPB11901 DPA10103-DPB12301 DPA10103-DPB13101 DPA10103-DPB13401 DPA10103-DPB13901 DPA10103-DPB14001 DPA10103-DPB14101 DPA10103-DPB14801 DPA10103-DPB15001 DPA10103-DPB15901 DPA10104-DPB10101 DPA10104-DPB11501 DPA10105-DPB10101 DPA10105-DPB10401 DPA10105-DPB15001 DPA10106-DPB10101 DPA10201-DPB10101 DPA10201-DPB110601 DPA10201-DPB11501 DPA10201-DPB11601 DPA10201-DPB11901 DPA10202-DPB10101 DPA10202-DPB10201 DPA10202-DPB10202 DPA10202-DPB10401 DPA10202-DPB110601 DPA10202-DPB11901 DPA10202-DPB13101 DPA10202-DPB16501 DPA10301-DPB10101 DPA10301-DPB10201 DPA10301-DPB10202 DPA10301-DPB10401 DPA10301-DPB10402 DPA10301-DPB110501 DPA10301-DPB110601 DPA10301-DPB11801 DPA10301-DPB12301 DPA10301-DPB13901 DPA10301-DPB14001 DPA10301-DPB14901 DPA10301-DPB15501 DPA10301-DPB16501 DPA10301-DPB17501 DPA10301-DPB18001 DPA10401-DPB10101 DPA10401-DPB10201; note = HLAs: DPA10401-DPB10202 DPA10401-DPB10402 DPA10401-DPB10501 DPA10401-DPB110501 DPA10401-DPB14901
PPFLWHGFELEPDK

SEQ ID NO: 6632 - protein, 20 aa, synthetic construct
  source 1..20: note = Seed: KEPPFLWMGYELHPDKWTVQ; note = HLAs: DPA10103-DPB10101 DPA10103-DPB10201 DPA10103-DPB10202 DPA10103-DPB10401 DPA10103-DPB10402 DPA10103-DPB10501 DPA10103-DPB110501 DPA10103-DPB112601 DPA10103-DPB11501 DPA10103-DPB11601 DPA10103-DPB11801 DPA10103-DPB11901 DPA10103-DPB12301 DPA10103-DPB13101 DPA10103-DPB13401 DPA10103-DPB13901 DPA10103-DPB14001 DPA10103-DPB14101 DPA10103-DPB14801 DPA10103-DPB14901 DPA10103-DPB15001 DPA10103-DPB15101 DPA10103-DPB15501 DPA10103-DPB15901 DPA10103-DPB18001 DPA10104-DPB10101 DPA10104-DPB11501 DPA10105-DPB10101 DPA10105-DPB10401 DPA10105-DPB11801 DPA10105-DPB15001 DPA10106-DPB10101 DPA10201-DPB10101 DPA10201-DPB10201 DPA10201-DPB10202 DPA10201-DPB10401 DPA10201-DPB10501 DPA10201-DPB110601 DPA10201-DPB11501 DPA10201-DPB11601 DPA10201-DPB11901 DPA10201-DPB13401 DPA10201-DPB15501 DPA10202-DPB10101 DPA10202-DPB10201 DPA10202-DPB10202 DPA10202-DPB10401 DPA10202-DPB10501 DPA10202-DPB110601 DPA10202-DPB11101 DPA10202-DPB11301 DPA10202-DPB11801 DPA10202-DPB11901 DPA10202-DPB13101 DPA10202-DPB13801; note = HLAs: DPA10202-DPB15501 DPA10202-DPB16501 DPA10301-DPB10101 DPA10301-DPB10201 DPA10301-DPB10202 DPA10301-DPB10401 DPA10301-DPB10402 DPA10301-DPB110501 DPA10301-DPB110601 DPA10301-DPB11101 DPA10301-DPB11301 DPA10301-DPB11801 DPA10301-DPB12301 DPA10301-DPB13901 DPA10301-DPB14001 DPA10301-DPB14901 DPA10301-DPB15501 DPA10301-DPB16501 DPA10301-DPB17501 DPA10301-DPB18001 DPA10401-DPB10101 DPA10401-DPB10201 DPA10401-DPB10202 DPA10401-DPB10402 DPA10401-DPB10501 DPA10401-DPB110501 DPA10401-DPB14901
KEPPWLWNGFELLPDKWTVQ

SEQ ID NO: 6633 - protein, 20 aa, synthetic construct
  source 1..20: note = Seed: KEPPFLWMGYELHPDKWTVQ; note = HLAs: DPA10103-DPB10101 DPA10103-DPB10201 DPA10103-DPB10202 DPA10103-DPB10401 DPA10103-DPB10402 DPA10103-DPB10501 DPA10103-DPB110501 DPA10103-DPB112601 DPA10103-DPB11501 DPA10103-DPB11601 DPA10103-DPB11801 DPA10103-DPB11901 DPA10103-DPB12301 DPA10103-DPB13101 DPA10103-DPB13401 DPA10103-DPB13901 DPA10103-DPB14001 DPA10103-DPB14101 DPA10103-DPB14801 DPA10103-DPB14901 DPA10103-DPB15001 DPA10103-DPB15101 DPA10103-DPB15501 DPA10103-DPB15901 DPA10103-DPB18001 DPA10104-DPB10101 DPA10104-DPB11501 DPA10105-DPB10101 DPA10105-DPB10401 DPA10105-DPB11801 DPA10105-DPB15001 DPA10106-DPB10101 DPA10201-DPB10101 DPA10201-DPB10201 DPA10201-DPB10202 DPA10201-DPB10401 DPA10201-DPB10501 DPA10201-DPB110601 DPA10201-DPB11501 DPA10201-DPB11601 DPA10201-DPB11901 DPA10201-DPB13401 DPA10201-DPB15501 DPA10202-DPB10101 DPA10202-DPB10201 DPA10202-DPB10202 DPA10202-DPB10401 DPA10202-DPB10501 DPA10202-DPB110601 DPA10202-DPB11101 DPA10202-DPB11301 DPA10202-DPB11801 DPA10202-DPB11901 DPA10202-DPB13101 DPA10202-DPB13801; note = HLAs: DPA10202-DPB15501 DPA10202-DPB16501 DPA10301-DPB10101 DPA10301-DPB10201 DPA10301-DPB10202 DPA10301-DPB10401 DPA10301-DPB10402 DPA10301-DPB110501 DPA10301-DPB110601 DPA10301-DPB11101 DPA10301-DPB11301 DPA10301-DPB11801 DPA10301-DPB12301 DPA10301-DPB13901 DPA10301-DPB14001 DPA10301-DPB14901 DPA10301-DPB15501 DPA10301-DPB16501 DPA10301-DPB17501 DPA10301-DPB18001 DPA10401-DPB10101 DPA10401-DPB10201 DPA10401-DPB10202 DPA10401-DPB10402 DPA10401-DPB10501 DPA10401-DPB110501 DPA10401-DPB14901
KEPPLLWTGFELYPDKWTVQ

SEQ ID NO: 6634 - protein, 20 aa, synthetic construct
  source 1..20: note = Seed: KEPPFLWMGYELHPDKWTVQ; note = HLAs: DRB1_0101 DPA10103-DPB10101 DPA10103-DPB10201 DPA10103-DPB10202 DPA10103-DPB10401 DPA10103-DPB10402 DPA10103-DPB10501 DPA10103-DPB110501 DPA10103-DPB112601 DPA10103-DPB11501 DPA10103-DPB11601 DPA10103-DPB11801 DPA10103-DPB11901 DPA10103-DPB12301 DPA10103-DPB13101 DPA10103-DPB13401 DPA10103-DPB13901 DPA10103-DPB14001 DPA10103-DPB14101 DPA10103-DPB14801 DPA10103-DPB14901 DPA10103-DPB15001 DPA10103-DPB15101 DPA10103-DPB15501 DPA10103-DPB15901 DPA10103-DPB18001 DPA10104-DPB10101 DPA10104-DPB11501 DPA10105-DPB10101 DPA10105-DPB10401 DPA10105-DPB11801 DPA10105-DPB15001 DPA10106-DPB10101 DPA10201-DPB10101 DPA10201-DPB10201 DPA10201-DPB10202 DPA10201-DPB10401 DPA10201-DPB10501 DPA10201-DPB110601 DPA10201-DPB11501 DPA10201-DPB11601 DPA10201-DPB11901 DPA10201-DPB13401 DPA10201-DPB15501 DPA10202-DPB10101 DPA10202-DPB10201 DPA10202-DPB10202 DPA10202-DPB10401 DPA10202-DPB10501 DPA10202-DPB110601 DPA10202-DPB11101 DPA10202-DPB11301 DPA10202-DPB11801 DPA10202-DPB11901 DPA10202-DPB13101; note = HLAs: DPA10202-DPB13801 DPA10202-DPB15501 DPA10202-DPB16501 DPA10301-DPB10101 DPA10301-DPB10201 DPA10301-DPB10202 DPA10301-DPB10401 DPA10301-DPB10402 DPA10301-DPB110501 DPA10301-DPB110601 DPA10301-DPB11101 DPA10301-DPB11301 DPA10301-DPB11801 DPA10301-DPB12301 DPA10301-DPB13901 DPA10301-DPB14001 DPA10301-DPB14901 DPA10301-DPB15501 DPA10301-DPB16501 DPA10301-DPB17501 DPA10301-DPB18001 DPA10401-DPB10101 DPA10401-DPB10201 DPA10401-DPB10202 DPA10401-DPB10402 DPA10401-DPB10501 DPA10401-DPB110501 DPA10401-DPB14901
KEPPFLWKGFELAPDKWTVQ

SEQ ID NO: 6635 - protein, 14 aa, synthetic construct
  source 1..14: note = Seed: PPFLWMGYELHPDK; note = HLAs: DPA10103-DPB10101 DPA10103-DPB10201 DPA10103-DPB10202 DPA10103-DPB10401 DPA10103-DPB112601 DPA10103-DPB11501 DPA10103-DPB11601 DPA10103-DPB11901 DPA10103-DPB12301 DPA10103-DPB13101 DPA10103-DPB13401 DPA10103-DPB13901 DPA10103-DPB14001 DPA10103-DPB14101 DPA10103-DPB14801 DPA10103-DPB15001 DPA10103-DPB15901 DPA10104-DPB10101 DPA10104-DPB11501 DPA10105-DPB10101 DPA10105-DPB10401 DPA10105-DPB15001 DPA10106-DPB10101 DPA10201-DPB10101 DPA10201-DPB110601 DPA10201-DPB11501 DPA10201-DPB11601 DPA10201-DPB11901 DPA10202-DPB10101 DPA10202-DPB10201 DPA10202-DPB10202 DPA10202-DPB10401 DPA10202-DPB110601 DPA10202-DPB11901 DPA10202-DPB13101 DPA10202-DPB16501 DPA10301-DPB10101 DPA10301-DPB10201 DPA10301-DPB10202 DPA10301-DPB10401 DPA10301-DPB10402 DPA10301-DPB110501 DPA10301-DPB110601 DPA10301-DPB11801 DPA10301-DPB12301 DPA10301-DPB13901 DPA10301-DPB14001 DPA10301-DPB14901 DPA10301-DPB15501 DPA10301-DPB16501 DPA10301-DPB17501 DPA10301-DPB18001 DPA10401-DPB10101 DPA10401-DPB10201; note = HLAs: DPA10401-DPB10202 DPA10401-DPB10402 DPA10401-DPB10501 DPA10401-DPB110501 DPA10401-DPB14901
PPFLWTGLELFPDK

SEQ ID NO: 6636 - protein, 14 aa, synthetic construct
  source 1..14: note = Seed: PPFLWMGYELHPDK; note = HLAs: DPA10103-DPB10101 DPA10103-DPB10201 DPA10103-DPB10202 DPA10103-DPB10401 DPA10103-DPB112601 DPA10103-DPB11501 DPA10103-DPB11601 DPA10103-DPB11901 DPA10103-DPB12301 DPA10103-DPB13101 DPA10103-DPB13401 DPA10103-DPB13901 DPA10103-DPB14001 DPA10103-DPB14101 DPA10103-DPB14801 DPA10103-DPB15001 DPA10103-DPB15901 DPA10104-DPB10101 DPA10104-DPB11501 DPA10105-DPB10101 DPA10105-DPB10401 DPA10105-DPB15001 DPA10106-DPB10101 DPA10201-DPB10101 DPA10201-DPB110601 DPA10201-DPB11501 DPA10201-DPB11601 DPA10201-DPB11901 DPA10202-DPB10101 DPA10202-DPB10201 DPA10202-DPB10202 DPA10202-DPB10401 DPA10202-DPB110601 DPA10202-DPB11901 DPA10202-DPB13101 DPA10202-DPB16501 DPA10301-DPB10101 DPA10301-DPB10201 DPA10301-DPB10202 DPA10301-DPB10401 DPA10301-DPB10402 DPA10301-DPB110501 DPA10301-DPB110601 DPA10301-DPB11801 DPA10301-DPB12301 DPA10301-DPB13901 DPA10301-DPB14001 DPA10301-DPB14901 DPA10301-DPB15501 DPA10301-DPB16501 DPA10301-DPB17501 DPA10301-DPB18001 DPA10401-DPB10101 DPA10401-DPB10201; note = HLAs: DPA10401-DPB10202 DPA10401-DPB10402 DPA10401-DPB10501 DPA10401-DPB110501 DPA10401-DPB14901
PPFLWYGFELMPDK

SEQ ID NO: 6637 - protein, 14 aa, synthetic construct
  source 1..14: note = Seed: PPFLWMGYELHPDK; note = HLAs: DPA10103-DPB10101 DPA10103-DPB10201 DPA10103-DPB10202 DPA10103-DPB10401 DPA10103-DPB112601 DPA10103-DPB11501 DPA10103-DPB11601 DPA10103-DPB11901 DPA10103-DPB12301 DPA10103-DPB13101 DPA10103-DPB13401 DPA10103-DPB13901 DPA10103-DPB14001 DPA10103-DPB14101 DPA10103-DPB14801 DPA10103-DPB15001 DPA10103-DPB15901 DPA10104-DPB10101 DPA10104-DPB11501 DPA10105-DPB10101 DPA10105-DPB10401 DPA10105-DPB15001 DPA10106-DPB10101 DPA10201-DPB10101 DPA10201-DPB110601 DPA10201-DPB11501 DPA10201-DPB11601 DPA10201-DPB11901 DPA10202-DPB10101 DPA10202-DPB10201 DPA10202-DPB10202 DPA10202-DPB10401 DPA10202-DPB110601 DPA10202-DPB11901 DPA10202-DPB13101 DPA10202-DPB16501 DPA10301-DPB10101 DPA10301-DPB10201 DPA10301-DPB10202 DPA10301-DPB10401 DPA10301-DPB10402 DPA10301-DPB110501 DPA10301-DPB110601 DPA10301-DPB11801 DPA10301-DPB12301 DPA10301-DPB13901 DPA10301-DPB14001 DPA10301-DPB14901 DPA10301-DPB15501 DPA10301-DPB16501 DPA10301-DPB17501 DPA10301-DPB18001 DPA10401-DPB10101 DPA10401-DPB10201; note = HLAs: DPA10401-DPB10202 DPA10401-DPB10402 DPA10401-DPB10501 DPA10401-DPB110501 DPA10401-DPB14901
PPFLWTGFELRPDK

SEQ ID NO: 6638 - protein, 14 aa, synthetic construct
  source 1..14: note = Seed: PPFLWMGYELHPDK; note = HLAs: DRB1_1001 DPA10103-DPB10201 DPA10103-DPB10202 DPA10103-DPB11501 DPA10103-DPB11601 DPA10103-DPB11901 DPA10103-DPB14001 DPA10103-DPB14101 DPA10103-DPB14801 DPA10103-DPB15901 DPA10104-DPB11501 DPA10201-DPB110601 DPA10201-DPB11501 DPA10201-DPB11601 DPA10201-DPB11901 DPA10202-DPB10201 DPA10202-DPB10202 DPA10202-DPB110601 DPA10202-DPB11901 DPA10202-DPB16501 DPA10301-DPB10201 DPA10301-DPB10202 DPA10301-DPB10401 DPA10301-DPB10402 DPA10301-DPB110501 DPA10301-DPB110601 DPA10301-DPB11801 DPA10301-DPB12301 DPA10301-DPB13901 DPA10301-DPB14001 DPA10301-DPB14901 DPA10301-DPB15501 DPA10301-DPB17501 DPA10301-DPB18001 DPA10401-DPB10201 DPA10401-DPB10202 DPA10401-DPB10402 DPA10401-DPB110501 DPA10401-DPB14901
PPFLWFGIELLPDK

SEQ ID NO: 6639 - protein, 20 aa, synthetic construct
  source 1..20: note = Seed: KEPPFLWMGYELHPDKWTVQ; note = HLAs: DRB1_0101 DPA10103-DPB10101 DPA10103-DPB10201 DPA10103-DPB10202 DPA10103-DPB10401 DPA10103-DPB10402 DPA10103-DPB10501 DPA10103-DPB110501 DPA10103-DPB112601 DPA10103-DPB11501 DPA10103-DPB11601 DPA10103-DPB11801 DPA10103-DPB11901 DPA10103-DPB12301 DPA10103-DPB13101 DPA10103-DPB13401 DPA10103-DPB13901 DPA10103-DPB14001 DPA10103-DPB14101 DPA10103-DPB14801 DPA10103-DPB14901 DPA10103-DPB15001 DPA10103-DPB15101 DPA10103-DPB15501 DPA10103-DPB15901 DPA10103-DPB18001 DPA10104-DPB10101 DPA10104-DPB11501 DPA10105-DPB10101 DPA10105-DPB10401 DPA10105-DPB11801 DPA10105-DPB15001 DPA10106-DPB10101 DPA10201-DPB10101 DPA10201-DPB10201 DPA10201-DPB10202 DPA10201-DPB10401 DPA10201-DPB10501 DPA10201-DPB110601 DPA10201-DPB11501 DPA10201-DPB11601 DPA10201-DPB11901 DPA10201-DPB13401 DPA10201-DPB15501 DPA10202-DPB10101 DPA10202-DPB10201 DPA10202-DPB10202 DPA10202-DPB10401 DPA10202-DPB10501 DPA10202-DPB110601 DPA10202-DPB11101 DPA10202-DPB11301 DPA10202-DPB11801 DPA10202-DPB11901 DPA10202-DPB13101; note = HLAs: DPA10202-DPB13801 DPA10202-DPB15501 DPA10202-DPB16501 DPA10301-DPB10101 DPA10301-DPB10201 DPA10301-DPB10202 DPA10301-DPB10401 DPA10301-DPB10402 DPA10301-DPB110501 DPA10301-DPB110601 DPA10301-DPB11101 DPA10301-DPB11301 DPA10301-DPB11801 DPA10301-DPB12301 DPA10301-DPB13901 DPA10301-DPB14001 DPA10301-DPB14901 DPA10301-DPB15501 DPA10301-DPB16501 DPA10301-DPB17501 DPA10301-DPB18001 DPA10401-DPB10101 DPA10401-DPB10201 DPA10401-DPB10202 DPA10401-DPB10402 DPA10401-DPB10501 DPA10401-DPB110501 DPA10401-DPB14901
KEPPILWQGFELVPDKWTVQ

SEQ ID NO: 6640 - protein, 14 aa, synthetic construct
  source 1..14: note = Seed: PPFLWMGYELHPDK; note = HLAs: DPA10103-DPB10201 DPA10103-DPB10202 DPA10103-DPB11501 DPA10103-DPB14001 DPA10103-DPB14101 DPA10103-DPB14801 DPA10104-DPB11501 DPA10201-DPB110601 DPA10201-DPB11501 DPA10201-DPB11601 DPA10201-DPB11901 DPA10202-DPB10201 DPA10202-DPB10202 DPA10202-DPB110601 DPA10202-DPB11901 DPA10301-DPB10201 DPA10301-DPB10202 DPA10301-DPB110601 DPA10301-DPB11801 DPA10301-DPB14001 DPA10401-DPB10201 DPA10401-DPB10202
PPFLWYGIELLPDK

SEQ ID NO: 6641 - protein, 14 aa, synthetic construct
  source 1..14: note = Seed: PPFLWMGYELHPDK; note = HLAs: DPA10103-DPB10101 DPA10103-DPB10201 DPA10103-DPB10202 DPA10103-DPB10401 DPA10103-DPB112601 DPA10103-DPB11501 DPA10103-DPB11601 DPA10103-DPB11901 DPA10103-DPB12301 DPA10103-DPB13101 DPA10103-DPB13401 DPA10103-DPB13901 DPA10103-DPB14001 DPA10103-DPB14101 DPA10103-DPB14801 DPA10103-DPB15001 DPA10103-DPB15901 DPA10104-DPB10101 DPA10104-DPB11501 DPA10105-DPB10101 DPA10105-DPB10401 DPA10105-DPB15001 DPA10106-DPB10101 DPA10201-DPB10101 DPA10201-DPB110601 DPA10201-DPB11501 DPA10201-DPB11601 DPA10201-DPB11901 DPA10202-DPB10101 DPA10202-DPB10201 DPA10202-DPB10202 DPA10202-DPB10401 DPA10202-DPB110601 DPA10202-DPB11901 DPA10202-DPB13101 DPA10202-DPB16501 DPA10301-DPB10101 DPA10301-DPB10201 DPA10301-DPB10202 DPA10301-DPB10401 DPA10301-DPB10402 DPA10301-DPB110501 DPA10301-DPB110601 DPA10301-DPB11801 DPA10301-DPB12301 DPA10301-DPB13901 DPA10301-DPB14001 DPA10301-DPB14901 DPA10301-DPB15501 DPA10301-DPB16501 DPA10301-DPB17501 DPA10301-DPB18001 DPA10401-DPB10101 DPA10401-DPB10201; note = HLAs: DPA10401-DPB10202 DPA10401-DPB10402 DPA10401-DPB10501 DPA10401-DPB110501 DPA10401-DPB14901
PPILWTGYELIPDK

SEQ ID NO: 6642 - protein, 20 aa, synthetic construct
  source 1..20: note = Seed: KEPPFLWMGYELHPDKWTVQ; note = HLAs: DPA10103-DPB10101 DPA10103-DPB10201 DPA10103-DPB10202 DPA10103-DPB10401 DPA10103-DPB10402 DPA10103-DPB10501 DPA10103-DPB110501 DPA10103-DPB112601 DPA10103-DPB11501 DPA10103-DPB11601 DPA10103-DPB11801 DPA10103-DPB11901 DPA10103-DPB12301 DPA10103-DPB13101 DPA10103-DPB13401 DPA10103-DPB13901 DPA10103-DPB14001 DPA10103-DPB14101 DPA10103-DPB14801 DPA10103-DPB14901 DPA10103-DPB15001 DPA10103-DPB15101 DPA10103-DPB15501 DPA10103-DPB15901 DPA10103-DPB18001 DPA10104-DPB10101 DPA10104-DPB11501 DPA10105-DPB10101 DPA10105-DPB10401 DPA10105-DPB11801 DPA10105-DPB15001 DPA10106-DPB10101 DPA10201-DPB10101 DPA10201-DPB10201 DPA10201-DPB10202 DPA10201-DPB10401 DPA10201-DPB10501 DPA10201-DPB110601 DPA10201-DPB11501 DPA10201-DPB11601 DPA10201-DPB11901 DPA10201-DPB13401 DPA10201-DPB15501 DPA10202-DPB10101 DPA10202-DPB10201 DPA10202-DPB10202 DPA10202-DPB10401 DPA10202-DPB10501 DPA10202-DPB110601 DPA10202-DPB11101 DPA10202-DPB11301 DPA10202-DPB11801 DPA10202-DPB11901 DPA10202-DPB13101 DPA10202-DPB13801; note = HLAs: DPA10202-DPB15501 DPA10202-DPB16501 DPA10301-DPB10101 DPA10301-DPB10201 DPA10301-DPB10202 DPA10301-DPB10401 DPA10301-DPB10402 DPA10301-DPB110501 DPA10301-DPB110601 DPA10301-DPB11101 DPA10301-DPB11301 DPA10301-DPB11801 DPA10301-DPB12301 DPA10301-DPB13901 DPA10301-DPB14001 DPA10301-DPB14901 DPA10301-DPB15501 DPA10301-DPB16501 DPA10301-DPB17501 DPA10301-DPB18001 DPA10401-DPB10101 DPA10401-DPB10201 DPA10401-DPB10202 DPA10401-DPB10402 DPA10401-DPB10501 DPA10401-DPB110501 DPA10401-DPB14901
KEPPYLWSGFELYPDKWTVQ

SEQ ID NO: 6643 - protein, 14 aa, synthetic construct
  source 1..14: note = Seed: PPFLWMGYELHPDK; note = HLAs: DPA10103-DPB10101 DPA10103-DPB10201 DPA10103-DPB10202 DPA10103-DPB10401 DPA10103-DPB112601 DPA10103-DPB11501 DPA10103-DPB11601 DPA10103-DPB11901 DPA10103-DPB12301 DPA10103-DPB13101 DPA10103-DPB13401 DPA10103-DPB13901 DPA10103-DPB14001 DPA10103-DPB14101 DPA10103-DPB14801 DPA10103-DPB15001 DPA10103-DPB15901 DPA10104-DPB10101 DPA10104-DPB11501 DPA10105-DPB10101 DPA10105-DPB10401 DPA10105-DPB15001 DPA10106-DPB10101 DPA10201-DPB10101 DPA10201-DPB110601 DPA10201-DPB11501 DPA10201-DPB11601 DPA10201-DPB11901 DPA10202-DPB10101 DPA10202-DPB10201 DPA10202-DPB10202 DPA10202-DPB10401 DPA10202-DPB110601 DPA10202-DPB11901 DPA10202-DPB13101 DPA10202-DPB16501 DPA10301-DPB10101 DPA10301-DPB10201 DPA10301-DPB10202 DPA10301-DPB10401 DPA10301-DPB10402 DPA10301-DPB110501 DPA10301-DPB110601 DPA10301-DPB11801 DPA10301-DPB12301 DPA10301-DPB13901 DPA10301-DPB14001 DPA10301-DPB14901 DPA10301-DPB15501 DPA10301-DPB16501 DPA10301-DPB17501 DPA10301-DPB18001 DPA10401-DPB10101 DPA10401-DPB10201; note = HLAs: DPA10401-DPB10202 DPA10401-DPB10402 DPA10401-DPB10501 DPA10401-DPB110501 DPA10401-DPB14901
PPFLWTGMELVPDK

SEQ ID NO: 6644 - protein, 14 aa, synthetic construct
  source 1..14: note = Seed: PPFLWMGYELHPDK; note = HLAs: DPA10103-DPB10101 DPA10103-DPB10201 DPA10103-DPB10202 DPA10103-DPB10401 DPA10103-DPB112601 DPA10103-DPB11501 DPA10103-DPB11601 DPA10103-DPB11901 DPA10103-DPB12301 DPA10103-DPB13101 DPA10103-DPB13401 DPA10103-DPB13901 DPA10103-DPB14001 DPA10103-DPB14101 DPA10103-DPB14801 DPA10103-DPB15001 DPA10103-DPB15901 DPA10104-DPB10101 DPA10104-DPB11501 DPA10105-DPB10101 DPA10105-DPB10401 DPA10105-DPB15001 DPA10106-DPB10101 DPA10201-DPB10101 DPA10201-DPB110601 DPA10201-DPB11501 DPA10201-DPB11601 DPA10201-DPB11901 DPA10202-DPB10101 DPA10202-DPB10201 DPA10202-DPB10202 DPA10202-DPB10401 DPA10202-DPB110601 DPA10202-DPB11901 DPA10202-DPB13101 DPA10202-DPB16501 DPA10301-DPB10101 DPA10301-DPB10201 DPA10301-DPB10202 DPA10301-DPB10401 DPA10301-DPB10402 DPA10301-DPB110501 DPA10301-DPB110601 DPA10301-DPB11801 DPA10301-DPB12301 DPA10301-DPB13901 DPA10301-DPB14001 DPA10301-DPB14901 DPA10301-DPB15501 DPA10301-DPB16501 DPA10301-DPB17501 DPA10301-DPB18001 DPA10401-DPB10101 DPA10401-DPB10201; note = HLAs: DPA10401-DPB10202 DPA10401-DPB10402 DPA10401-DPB10501 DPA10401-DPB110501 DPA10401-DPB14901
PPYLWTGYELVPDK

SEQ ID NO: 6645 - protein, 14 aa, synthetic construct
  source 1..14: note = Seed: PPFLWMGYELHPDK; note = HLAs: DRB1_1001 DPA10103-DPB10101 DPA10103-DPB10201 DPA10103-DPB10202 DPA10103-DPB10401 DPA10103-DPB112601 DPA10103-DPB11501 DPA10103-DPB11601 DPA10103-DPB11901 DPA10103-DPB12301 DPA10103-DPB13101 DPA10103-DPB13401 DPA10103-DPB13901 DPA10103-DPB14001 DPA10103-DPB14101 DPA10103-DPB14801 DPA10103-DPB15001 DPA10103-DPB15901 DPA10104-DPB10101 DPA10104-DPB11501 DPA10105-DPB10101 DPA10105-DPB10401 DPA10105-DPB15001 DPA10106-DPB10101 DPA10201-DPB10101 DPA10201-DPB110601 DPA10201-DPB11501 DPA10201-DPB11601 DPA10201-DPB11901 DPA10202-DPB10101 DPA10202-DPB10201 DPA10202-DPB10202 DPA10202-DPB10401 DPA10202-DPB110601 DPA10202-DPB11901 DPA10202-DPB13101 DPA10202-DPB16501 DPA10301-DPB10101 DPA10301-DPB10201 DPA10301-DPB10202 DPA10301-DPB10401 DPA10301-DPB10402 DPA10301-DPB110501 DPA10301-DPB110601 DPA10301-DPB11801 DPA10301-DPB12301 DPA10301-DPB13901 DPA10301-DPB14001 DPA10301-DPB14901 DPA10301-DPB15501 DPA10301-DPB16501 DPA10301-DPB17501 DPA10301-DPB18001 DPA10401-DPB10101 DPA10401-DPB10201; note = HLAs: DPA10401-DPB10202 DPA10401-DPB10402 DPA10401-DPB10501 DPA10401-DPB110501 DPA10401-DPB14901
PPFLWAGLELVPDK

SEQ ID NO: 6646 - protein, 20 aa, synthetic construct
  source 1..20: note = Seed: KEPPFLWMGYELHPDKWTVQ; note = HLAs: DRB1_0101 DRB1_1001 DPA10103-DPB10101 DPA10103-DPB10201 DPA10103-DPB10202 DPA10103-DPB10401 DPA10103-DPB10402 DPA10103-DPB10501 DPA10103-DPB110501 DPA10103-DPB112601 DPA10103-DPB11501 DPA10103-DPB11601 DPA10103-DPB11801 DPA10103-DPB11901 DPA10103-DPB12301 DPA10103-DPB13101 DPA10103-DPB13401 DPA10103-DPB13901 DPA10103-DPB14001 DPA10103-DPB14101 DPA10103-DPB14801 DPA10103-DPB14901 DPA10103-DPB15001 DPA10103-DPB15101 DPA10103-DPB15501 DPA10103-DPB15901 DPA10103-DPB18001 DPA10104-DPB10101 DPA10104-DPB11501 DPA10105-DPB10101 DPA10105-DPB10401 DPA10105-DPB11801 DPA10105-DPB15001 DPA10106-DPB10101 DPA10201-DPB10101 DPA10201-DPB10201 DPA10201-DPB10202 DPA10201-DPB10401 DPA10201-DPB10501 DPA10201-DPB110601 DPA10201-DPB11501 DPA10201-DPB11601 DPA10201-DPB11901 DPA10201-DPB13401 DPA10201-DPB15501 DPA10202-DPB10101 DPA10202-DPB10201 DPA10202-DPB10202 DPA10202-DPB10401 DPA10202-DPB10501 DPA10202-DPB110601 DPA10202-DPB11101 DPA10202-DPB11301 DPA10202-DPB11801 DPA10202-DPB11901; note = HLAs: DPA10202-DPB13101 DPA10202-DPB13801 DPA10202-DPB15501 DPA10202-DPB16501 DPA10301-DPB10101 DPA10301-DPB10201 DPA10301-DPB10202 DPA10301-DPB10401 DPA10301-DPB10402 DPA10301-DPB110501 DPA10301-DPB110601 DPA10301-DPB11101 DPA10301-DPB11301 DPA10301-DPB11801 DPA10301-DPB12301 DPA10301-DPB13901 DPA10301-DPB14001 DPA10301-DPB14901 DPA10301-DPB15501 DPA10301-DPB16501 DPA10301-DPB17501 DPA10301-DPB18001 DPA10401-DPB10101 DPA10401-DPB10201 DPA10401-DPB10202 DPA10401-DPB10402 DPA10401-DPB10501 DPA10401-DPB110501 DPA10401-DPB14901
KEPPFLWHGIELVPDKWTVQ

SEQ ID NO: 6647 - protein, 14 aa, synthetic construct
  source 1..14: note = Seed: PPFLWMGYELHPDK; note = HLAs: DRB1_1001 DPA10103-DPB10101 DPA10103-DPB10201 DPA10103-DPB10202 DPA10103-DPB10401 DPA10103-DPB112601 DPA10103-DPB11501 DPA10103-DPB11601 DPA10103-DPB11901 DPA10103-DPB12301 DPA10103-DPB13101 DPA10103-DPB13401 DPA10103-DPB13901 DPA10103-DPB14001 DPA10103-DPB14101 DPA10103-DPB14801 DPA10103-DPB15001 DPA10103-DPB15901 DPA10104-DPB10101 DPA10104-DPB11501 DPA10105-DPB10101 DPA10105-DPB10401 DPA10105-DPB15001 DPA10106-DPB10101 DPA10201-DPB10101 DPA10201-DPB110601 DPA10201-DPB11501 DPA10201-DPB11601 DPA10201-DPB11901 DPA10202-DPB10101 DPA10202-DPB10201 DPA10202-DPB10202 DPA10202-DPB10401 DPA10202-DPB110601 DPA10202-DPB11901 DPA10202-DPB13101 DPA10202-DPB16501 DPA10301-DPB10101 DPA10301-DPB10201 DPA10301-DPB10202 DPA10301-DPB10401 DPA10301-DPB10402 DPA10301-DPB110501 DPA10301-DPB110601 DPA10301-DPB11801 DPA10301-DPB12301 DPA10301-DPB13901 DPA10301-DPB14001 DPA10301-DPB14901 DPA10301-DPB15501 DPA10301-DPB16501 DPA10301-DPB17501 DPA10301-DPB18001 DPA10401-DPB10101 DPA10401-DPB10201; note = HLAs: DPA10401-DPB10202 DPA10401-DPB10402 DPA10401-DPB10501 DPA10401-DPB110501 DPA10401-DPB14901
PPFLWLGFELSPDK

SEQ ID NO: 6648 - protein, 14 aa, synthetic construct
  source 1..14: note = Seed: PPFLWMGYELHPDK; note = HLAs: DRB1_1001 DPA10103-DPB10101 DPA10103-DPB10201 DPA10103-DPB10202 DPA10103-DPB10401 DPA10103-DPB112601 DPA10103-DPB11501 DPA10103-DPB11601 DPA10103-DPB11901 DPA10103-DPB12301 DPA10103-DPB13101 DPA10103-DPB13401 DPA10103-DPB13901 DPA10103-DPB14001 DPA10103-DPB14101 DPA10103-DPB14801 DPA10103-DPB15001 DPA10103-DPB15901 DPA10104-DPB10101 DPA10104-DPB11501 DPA10105-DPB10101 DPA10105-DPB10401 DPA10105-DPB15001 DPA10106-DPB10101 DPA10201-DPB10101 DPA10201-DPB110601 DPA10201-DPB11501 DPA10201-DPB11601 DPA10201-DPB11901 DPA10202-DPB10101 DPA10202-DPB10201 DPA10202-DPB10202 DPA10202-DPB10401 DPA10202-DPB110601 DPA10202-DPB11901 DPA10202-DPB13101 DPA10202-DPB16501 DPA10301-DPB10101 DPA10301-DPB10201 DPA10301-DPB10202 DPA10301-DPB10401 DPA10301-DPB10402 DPA10301-DPB110501 DPA10301-DPB110601 DPA10301-DPB11801 DPA10301-DPB12301 DPA10301-DPB13901 DPA10301-DPB14001 DPA10301-DPB14901 DPA10301-DPB15501 DPA10301-DPB16501 DPA10301-DPB17501 DPA10301-DPB18001 DPA10401-DPB10101 DPA10401-DPB10201; note = HLAs: DPA10401-DPB10202 DPA10401-DPB10402 DPA10401-DPB10501 DPA10401-DPB110501 DPA10401-DPB14901
PPFLWSGIELVPDK

SEQ ID NO: 6649 - protein, 14 aa, synthetic construct
  source 1..14: note = Seed: PPFLWMGYELHPDK; note = HLAs: DRB1_1001 DPA10103-DPB10101 DPA10103-DPB10201 DPA10103-DPB10202 DPA10103-DPB10401 DPA10103-DPB112601 DPA10103-DPB11501 DPA10103-DPB11601 DPA10103-DPB11901 DPA10103-DPB12301 DPA10103-DPB13101 DPA10103-DPB13401 DPA10103-DPB13901 DPA10103-DPB14001 DPA10103-DPB14101 DPA10103-DPB14801 DPA10103-DPB15001 DPA10103-DPB15901 DPA10104-DPB10101 DPA10104-DPB11501 DPA10105-DPB10101 DPA10105-DPB10401 DPA10105-DPB15001 DPA10106-DPB10101 DPA10201-DPB10101 DPA10201-DPB110601 DPA10201-DPB11501 DPA10201-DPB11601 DPA10201-DPB11901 DPA10202-DPB10101 DPA10202-DPB10201 DPA10202-DPB10202 DPA10202-DPB10401 DPA10202-DPB110601 DPA10202-DPB11901 DPA10202-DPB13101 DPA10202-DPB16501 DPA10301-DPB10101 DPA10301-DPB10201 DPA10301-DPB10202 DPA10301-DPB10401 DPA10301-DPB10402 DPA10301-DPB110501 DPA10301-DPB110601 DPA10301-DPB11801 DPA10301-DPB12301 DPA10301-DPB13901 DPA10301-DPB14001 DPA10301-DPB14901 DPA10301-DPB15501 DPA10301-DPB16501 DPA10301-DPB17501 DPA10301-DPB18001 DPA10401-DPB10101 DPA10401-DPB10201; note = HLAs: DPA10401-DPB10202 DPA10401-DPB10402 DPA10401-DPB10501 DPA10401-DPB110501 DPA10401-DPB14901
PPFLWEGLELVPDK

SEQ ID NO: 6650 - protein, 20 aa, synthetic construct
  source 1..20: note = Seed: KEPPFLWMGYELHPDKWTVQ; note = HLAs: DPA10103-DPB10101 DPA10103-DPB10201 DPA10103-DPB10202 DPA10103-DPB10401 DPA10103-DPB10402 DPA10103-DPB10501 DPA10103-DPB110501 DPA10103-DPB112601 DPA10103-DPB11501 DPA10103-DPB11601 DPA10103-DPB11801 DPA10103-DPB11901 DPA10103-DPB12301 DPA10103-DPB13101 DPA10103-DPB13401 DPA10103-DPB13901 DPA10103-DPB14001 DPA10103-DPB14101 DPA10103-DPB14801 DPA10103-DPB14901 DPA10103-DPB15001 DPA10103-DPB15101 DPA10103-DPB15501 DPA10103-DPB15901 DPA10103-DPB18001 DPA10104-DPB10101 DPA10104-DPB11501 DPA10105-DPB10101 DPA10105-DPB10401 DPA10105-DPB11801 DPA10105-DPB15001 DPA10106-DPB10101 DPA10201-DPB10101 DPA10201-DPB10201 DPA10201-DPB10202 DPA10201-DPB10401 DPA10201-DPB10501 DPA10201-DPB110601 DPA10201-DPB11501 DPA10201-DPB11601 DPA10201-DPB11901 DPA10201-DPB13401 DPA10201-DPB15501 DPA10202-DPB10101 DPA10202-DPB10201 DPA10202-DPB10202 DPA10202-DPB10401 DPA10202-DPB10501 DPA10202-DPB110601 DPA10202-DPB11101 DPA10202-DPB11301 DPA10202-DPB11801 DPA10202-DPB11901 DPA10202-DPB13101 DPA10202-DPB13801; note = HLAs: DPA10202-DPB15501 DPA10202-DPB16501 DPA10301-DPB10101 DPA10301-DPB10201 DPA10301-DPB10202 DPA10301-DPB10401 DPA10301-DPB10402 DPA10301-DPB110501 DPA10301-DPB110601 DPA10301-DPB11101 DPA10301-DPB11301 DPA10301-DPB11801 DPA10301-DPB12301 DPA10301-DPB13901 DPA10301-DPB14001 DPA10301-DPB14901 DPA10301-DPB15501 DPA10301-DPB16501 DPA10301-DPB17501 DPA10301-DPB18001 DPA10401-DPB10101 DPA10401-DPB10201 DPA10401-DPB10202 DPA10401-DPB10402 DPA10401-DPB10501 DPA10401-DPB110501 DPA10401-DPB14901
KEPPFLWNGYELLPDKWTVQ

SEQ ID NO: 6651 - protein, 14 aa, synthetic construct
  source 1..14: note = Seed: PPFLWMGYELHPDK; note = HLAs: DRB1_1001 DPA10103-DPB10101 DPA10103-DPB10201 DPA10103-DPB10202 DPA10103-DPB10401 DPA10103-DPB112601 DPA10103-DPB11501 DPA10103-DPB11601 DPA10103-DPB11901 DPA10103-DPB12301 DPA10103-DPB13101 DPA10103-DPB13401 DPA10103-DPB13901 DPA10103-DPB14001 DPA10103-DPB14101 DPA10103-DPB14801 DPA10103-DPB15001 DPA10103-DPB15901 DPA10104-DPB10101 DPA10104-DPB11501 DPA10105-DPB10101 DPA10105-DPB10401 DPA10105-DPB15001 DPA10106-DPB10101 DPA10201-DPB10101 DPA10201-DPB110601 DPA10201-DPB11501 DPA10201-DPB11601 DPA10201-DPB11901 DPA10202-DPB10101 DPA10202-DPB10201 DPA10202-DPB10202 DPA10202-DPB10401 DPA10202-DPB110601 DPA10202-DPB11901 DPA10202-DPB13101 DPA10202-DPB16501 DPA10301-DPB10101 DPA10301-DPB10201 DPA10301-DPB10202 DPA10301-DPB10401 DPA10301-DPB10402 DPA10301-DPB110501 DPA10301-DPB110601 DPA10301-DPB11801 DPA10301-DPB12301 DPA10301-DPB13901 DPA10301-DPB14001 DPA10301-DPB14901 DPA10301-DPB15501 DPA10301-DPB16501 DPA10301-DPB17501 DPA10301-DPB18001 DPA10401-DPB10101 DPA10401-DPB10201; note = HLAs: DPA10401-DPB10202 DPA10401-DPB10402 DPA10401-DPB10501 DPA10401-DPB110501 DPA10401-DPB14901
PPFLWQGLELLPDK

SEQ ID NO: 6652 - protein, 14 aa, synthetic construct
  source 1..14: note = Seed: PPFLWMGYELHPDK; note = HLAs: DPA10103-DPB10101 DPA10103-DPB10201 DPA10103-DPB10202 DPA10103-DPB10401 DPA10103-DPB112601 DPA10103-DPB11501 DPA10103-DPB11601 DPA10103-DPB11901 DPA10103-DPB12301 DPA10103-DPB13101 DPA10103-DPB13401 DPA10103-DPB13901 DPA10103-DPB14001 DPA10103-DPB14101 DPA10103-DPB14801 DPA10103-DPB15001 DPA10103-DPB15901 DPA10104-DPB10101 DPA10104-DPB11501 DPA10105-DPB10101 DPA10105-DPB10401 DPA10105-DPB15001 DPA10106-DPB10101 DPA10201-DPB10101 DPA10201-DPB110601 DPA10201-DPB11501 DPA10201-DPB11601 DPA10201-DPB11901 DPA10202-DPB10101 DPA10202-DPB10201 DPA10202-DPB10202 DPA10202-DPB10401 DPA10202-DPB110601 DPA10202-DPB11901 DPA10202-DPB13101 DPA10202-DPB16501 DPA10301-DPB10101 DPA10301-DPB10201 DPA10301-DPB10202 DPA10301-DPB10401 DPA10301-DPB10402 DPA10301-DPB110501 DPA10301-DPB110601 DPA10301-DPB11801 DPA10301-DPB12301 DPA10301-DPB13901 DPA10301-DPB14001 DPA10301-DPB14901 DPA10301-DPB15501 DPA10301-DPB16501 DPA10301-DPB17501 DPA10301-DPB18001 DPA10401-DPB10101 DPA10401-DPB10201; note = HLAs: DPA10401-DPB10202 DPA10401-DPB10402 DPA10401-DPB10501 DPA10401-DPB110501 DPA10401-DPB14901
PPWLWNGFELIPDK

SEQ ID NO: 6653 - protein, 20 aa, synthetic construct
  source 1..20: note = Seed: KEPPFLWMGYELHPDKWTVQ; note = HLAs: DRB1_0101 DRB1_1001 DPA10103-DPB10101 DPA10103-DPB10201 DPA10103-DPB10202 DPA10103-DPB10401 DPA10103-DPB10402 DPA10103-DPB10501 DPA10103-DPB110501 DPA10103-DPB112601 DPA10103-DPB11501 DPA10103-DPB11601 DPA10103-DPB11801 DPA10103-DPB11901 DPA10103-DPB12301 DPA10103-DPB13101 DPA10103-DPB13401 DPA10103-DPB13901 DPA10103-DPB14001 DPA10103-DPB14101 DPA10103-DPB14801 DPA10103-DPB14901 DPA10103-DPB15001 DPA10103-DPB15101 DPA10103-DPB15501 DPA10103-DPB15901 DPA10103-DPB18001 DPA10104-DPB10101 DPA10104-DPB11501 DPA10105-DPB10101 DPA10105-DPB10401 DPA10105-DPB11801 DPA10105-DPB15001 DPA10106-DPB10101 DPA10201-DPB10101 DPA10201-DPB10201 DPA10201-DPB10202 DPA10201-DPB10401 DPA10201-DPB10501 DPA10201-DPB110601 DPA10201-DPB11501 DPA10201-DPB11601 DPA10201-DPB11901 DPA10201-DPB13401 DPA10201-DPB15501 DPA10202-DPB10101 DPA10202-DPB10201 DPA10202-DPB10202 DPA10202-DPB10401 DPA10202-DPB10501 DPA10202-DPB110601 DPA10202-DPB11101 DPA10202-DPB11301 DPA10202-DPB11801 DPA10202-DPB11901; note = HLAs: DPA10202-DPB13101 DPA10202-DPB13801 DPA10202-DPB15501 DPA10202-DPB16501 DPA10301-DPB10101 DPA10301-DPB10201 DPA10301-DPB10202 DPA10301-DPB10401 DPA10301-DPB10402 DPA10301-DPB110501 DPA10301-DPB110601 DPA10301-DPB11101 DPA10301-DPB11301 DPA10301-DPB11801 DPA10301-DPB12301 DPA10301-DPB13901 DPA10301-DPB14001 DPA10301-DPB14901 DPA10301-DPB15501 DPA10301-DPB16501 DPA10301-DPB17501 DPA10301-DPB18001 DPA10401-DPB10101 DPA10401-DPB10201 DPA10401-DPB10202 DPA10401-DPB10402 DPA10401-DPB10501 DPA10401-DPB110501 DPA10401-DPB14901
KEPPFLWFGYELVPDKWTVQ

SEQ ID NO: 6654 - protein, 14 aa, synthetic construct
  source 1..14: note = Seed: PPFLWMGYELHPDK; note = HLAs: DPA10103-DPB10101 DPA10103-DPB10201 DPA10103-DPB10202 DPA10103-DPB10401 DPA10103-DPB112601 DPA10103-DPB11501 DPA10103-DPB11601 DPA10103-DPB11901 DPA10103-DPB12301 DPA10103-DPB13101 DPA10103-DPB13401 DPA10103-DPB13901 DPA10103-DPB14001 DPA10103-DPB14101 DPA10103-DPB14801 DPA10103-DPB15001 DPA10103-DPB15901 DPA10104-DPB10101 DPA10104-DPB11501 DPA10105-DPB10101 DPA10105-DPB10401 DPA10105-DPB15001 DPA10106-DPB10101 DPA10201-DPB10101 DPA10201-DPB110601 DPA10201-DPB11501 DPA10201-DPB11601 DPA10201-DPB11901 DPA10202-DPB10101 DPA10202-DPB10201 DPA10202-DPB10202 DPA10202-DPB10401 DPA10202-DPB110601 DPA10202-DPB11901 DPA10202-DPB13101 DPA10202-DPB16501 DPA10301-DPB10101 DPA10301-DPB10201 DPA10301-DPB10202 DPA10301-DPB10401 DPA10301-DPB10402 DPA10301-DPB110501 DPA10301-DPB110601 DPA10301-DPB11801 DPA10301-DPB12301 DPA10301-DPB13901 DPA10301-DPB14001 DPA10301-DPB14901 DPA10301-DPB15501 DPA10301-DPB16501 DPA10301-DPB17501 DPA10301-DPB18001 DPA10401-DPB10101 DPA10401-DPB10201; note = HLAs: DPA10401-DPB10202 DPA10401-DPB10402 DPA10401-DPB10501 DPA10401-DPB110501 DPA10401-DPB14901
PPFLWAGFELDPDK

SEQ ID NO: 6655 - protein, 20 aa, synthetic construct
  source 1..20: note = Seed: KEPPFLWMGYELHPDKWTVQ; note = HLAs: DRB1_0101 DPA10103-DPB10101 DPA10103-DPB10201 DPA10103-DPB10202 DPA10103-DPB10401 DPA10103-DPB10402 DPA10103-DPB10501 DPA10103-DPB110501 DPA10103-DPB112601 DPA10103-DPB11501 DPA10103-DPB11601 DPA10103-DPB11801 DPA10103-DPB11901 DPA10103-DPB12301 DPA10103-DPB13101 DPA10103-DPB13401 DPA10103-DPB13901 DPA10103-DPB14001 DPA10103-DPB14101 DPA10103-DPB14801 DPA10103-DPB14901 DPA10103-DPB15001 DPA10103-DPB15101 DPA10103-DPB15501 DPA10103-DPB15901 DPA10103-DPB18001 DPA10104-DPB10101 DPA10104-DPB11501 DPA10105-DPB10101 DPA10105-DPB10401 DPA10105-DPB11801 DPA10105-DPB15001 DPA10106-DPB10101 DPA10201-DPB10101 DPA10201-DPB10201 DPA10201-DPB10202 DPA10201-DPB10401 DPA10201-DPB10501 DPA10201-DPB110601 DPA10201-DPB11501 DPA10201-DPB11601 DPA10201-DPB11901 DPA10201-DPB13401 DPA10201-DPB15501 DPA10202-DPB10101 DPA10202-DPB10201 DPA10202-DPB10202 DPA10202-DPB10401 DPA10202-DPB10501 DPA10202-DPB110601 DPA10202-DPB11101 DPA10202-DPB11301 DPA10202-DPB11801 DPA10202-DPB11901 DPA10202-DPB13101; note = HLAs: DPA10202-DPB13801 DPA10202-DPB15501 DPA10202-DPB16501 DPA10301-DPB10101 DPA10301-DPB10201 DPA10301-DPB10202 DPA10301-DPB10401 DPA10301-DPB10402 DPA10301-DPB110501 DPA10301-DPB110601 DPA10301-DPB11101 DPA10301-DPB11301 DPA10301-DPB11801 DPA10301-DPB12301 DPA10301-DPB13901 DPA10301-DPB14001 DPA10301-DPB14901 DPA10301-DPB15501 DPA10301-DPB16501 DPA10301-DPB17501 DPA10301-DPB18001 DPA10401-DPB10101 DPA10401-DPB10201 DPA10401-DPB10202 DPA10401-DPB10402 DPA10401-DPB10501 DPA10401-DPB110501 DPA10401-DPB14901
KEPPFLWIGWELVPDKWTVQ

SEQ ID NO: 6656 - protein, 20 aa, synthetic construct
  source 1..20: note = Seed: KEPPFLWMGYELHPDKWTVQ; note = HLAs: DRB1_0101 DPA10103-DPB10101 DPA10103-DPB10201 DPA10103-DPB10202 DPA10103-DPB10401 DPA10103-DPB10402 DPA10103-DPB10501 DPA10103-DPB110501 DPA10103-DPB112601 DPA10103-DPB11501 DPA10103-DPB11601 DPA10103-DPB11801 DPA10103-DPB11901 DPA10103-DPB12301 DPA10103-DPB13101 DPA10103-DPB13401 DPA10103-DPB13901 DPA10103-DPB14001 DPA10103-DPB14101 DPA10103-DPB14801 DPA10103-DPB14901 DPA10103-DPB15001 DPA10103-DPB15101 DPA10103-DPB15501 DPA10103-DPB15901 DPA10103-DPB18001 DPA10104-DPB10101 DPA10104-DPB11501 DPA10105-DPB10101 DPA10105-DPB10401 DPA10105-DPB11801 DPA10105-DPB15001 DPA10106-DPB10101 DPA10201-DPB10101 DPA10201-DPB10201 DPA10201-DPB10202 DPA10201-DPB10401 DPA10201-DPB10501 DPA10201-DPB110601 DPA10201-DPB11501 DPA10201-DPB11601 DPA10201-DPB11901 DPA10201-DPB13401 DPA10201-DPB15501 DPA10202-DPB10101 DPA10202-DPB10201 DPA10202-DPB10202 DPA10202-DPB10401 DPA10202-DPB10501 DPA10202-DPB110601 DPA10202-DPB11101 DPA10202-DPB11301 DPA10202-DPB11801 DPA10202-DPB11901 DPA10202-DPB13101; note = HLAs: DPA10202-DPB13801 DPA10202-DPB15501 DPA10202-DPB16501 DPA10301-DPB10101 DPA10301-DPB10201 DPA10301-DPB10202 DPA10301-DPB10401 DPA10301-DPB10402 DPA10301-DPB110501 DPA10301-DPB110601 DPA10301-DPB11101 DPA10301-DPB11301 DPA10301-DPB11801 DPA10301-DPB12301 DPA10301-DPB13901 DPA10301-DPB14001 DPA10301-DPB14901 DPA10301-DPB15501 DPA10301-DPB16501 DPA10301-DPB17501 DPA10301-DPB18001 DPA10401-DPB10101 DPA10401-DPB10201 DPA10401-DPB10202 DPA10401-DPB10402 DPA10401-DPB10501 DPA10401-DPB110501 DPA10401-DPB14901
KEPPFLWWGFELIPDKWTVQ

SEQ ID NO: 6657 - protein, 14 aa, synthetic construct
  source 1..14: note = Seed: PPFLWMGYELHPDK; note = HLAs: DPA10103-DPB10101 DPA10103-DPB10201 DPA10103-DPB10202 DPA10103-DPB10401 DPA10103-DPB112601 DPA10103-DPB11501 DPA10103-DPB11601 DPA10103-DPB11901 DPA10103-DPB12301 DPA10103-DPB13101 DPA10103-DPB13401 DPA10103-DPB13901 DPA10103-DPB14001 DPA10103-DPB14101 DPA10103-DPB14801 DPA10103-DPB15001 DPA10103-DPB15901 DPA10104-DPB10101 DPA10104-DPB11501 DPA10105-DPB10101 DPA10105-DPB10401 DPA10105-DPB15001 DPA10106-DPB10101 DPA10201-DPB10101 DPA10201-DPB110601 DPA10201-DPB11501 DPA10201-DPB11601 DPA10201-DPB11901 DPA10202-DPB10101 DPA10202-DPB10201 DPA10202-DPB10202 DPA10202-DPB10401 DPA10202-DPB110601 DPA10202-DPB11901 DPA10202-DPB13101 DPA10202-DPB16501 DPA10301-DPB10101 DPA10301-DPB10201 DPA10301-DPB10202 DPA10301-DPB10401 DPA10301-DPB10402 DPA10301-DPB110501 DPA10301-DPB110601 DPA10301-DPB11801 DPA10301-DPB12301 DPA10301-DPB13901 DPA10301-DPB14001 DPA10301-DPB14901 DPA10301-DPB15501 DPA10301-DPB16501 DPA10301-DPB17501 DPA10301-DPB18001 DPA10401-DPB10101 DPA10401-DPB10201; note = HLAs: DPA10401-DPB10202 DPA10401-DPB10402 DPA10401-DPB10501 DPA10401-DPB110501 DPA10401-DPB14901
PPWLWNGFELVPDK

SEQ ID NO: 6658 - protein, 20 aa, synthetic construct
  source 1..20: note = Seed: KEPPFLWMGYELHPDKWTVQ; note = HLAs: DRB1_0101 DRB1_1001 DPA10103-DPB10101 DPA10103-DPB10201 DPA10103-DPB10202 DPA10103-DPB10401 DPA10103-DPB10402 DPA10103-DPB10501 DPA10103-DPB110501 DPA10103-DPB112601 DPA10103-DPB11501 DPA10103-DPB11601 DPA10103-DPB11801 DPA10103-DPB11901 DPA10103-DPB12301 DPA10103-DPB13101 DPA10103-DPB13401 DPA10103-DPB13901 DPA10103-DPB14001 DPA10103-DPB14101 DPA10103-DPB14801 DPA10103-DPB14901 DPA10103-DPB15001 DPA10103-DPB15101 DPA10103-DPB15501 DPA10103-DPB15901 DPA10103-DPB18001 DPA10104-DPB10101 DPA10104-DPB11501 DPA10105-DPB10101 DPA10105-DPB10401 DPA10105-DPB11801 DPA10105-DPB15001 DPA10106-DPB10101 DPA10201-DPB10101 DPA10201-DPB10201 DPA10201-DPB10202 DPA10201-DPB10401 DPA10201-DPB10501 DPA10201-DPB110601 DPA10201-DPB11501 DPA10201-DPB11601 DPA10201-DPB11901 DPA10201-DPB13401 DPA10201-DPB15501 DPA10202-DPB10101 DPA10202-DPB10201 DPA10202-DPB10202 DPA10202-DPB10401 DPA10202-DPB10501 DPA10202-DPB110601 DPA10202-DPB11101 DPA10202-DPB11301 DPA10202-DPB11801 DPA10202-DPB11901; note = HLAs: DPA10202-DPB13101 DPA10202-DPB13801 DPA10202-DPB15501 DPA10202-DPB16501 DPA10301-DPB10101 DPA10301-DPB10201 DPA10301-DPB10202 DPA10301-DPB10401 DPA10301-DPB10402 DPA10301-DPB110501 DPA10301-DPB110601 DPA10301-DPB11101 DPA10301-DPB11301 DPA10301-DPB11801 DPA10301-DPB12301 DPA10301-DPB13901 DPA10301-DPB14001 DPA10301-DPB14901 DPA10301-DPB15501 DPA10301-DPB16501 DPA10301-DPB17501 DPA10301-DPB18001 DPA10401-DPB10101 DPA10401-DPB10201 DPA10401-DPB10202 DPA10401-DPB10402 DPA10401-DPB10501 DPA10401-DPB110501 DPA10401-DPB14901
KEPPFLWMGFELAPDKWTVQ

SEQ ID NO: 6659 - protein, 14 aa, synthetic construct
  source 1..14: note = Seed: PPFLWMGYELHPDK; note = HLAs: DPA10103-DPB10101 DPA10103-DPB10201 DPA10103-DPB10202 DPA10103-DPB10401 DPA10103-DPB112601 DPA10103-DPB11501 DPA10103-DPB11601 DPA10103-DPB11901 DPA10103-DPB12301 DPA10103-DPB13101 DPA10103-DPB13401 DPA10103-DPB13901 DPA10103-DPB14001 DPA10103-DPB14101 DPA10103-DPB14801 DPA10103-DPB15001 DPA10103-DPB15901 DPA10104-DPB10101 DPA10104-DPB11501 DPA10105-DPB10101 DPA10105-DPB10401 DPA10105-DPB15001 DPA10106-DPB10101 DPA10201-DPB10101 DPA10201-DPB110601 DPA10201-DPB11501 DPA10201-DPB11601 DPA10201-DPB11901 DPA10202-DPB10101 DPA10202-DPB10201 DPA10202-DPB10202 DPA10202-DPB10401 DPA10202-DPB110601 DPA10202-DPB11901 DPA10202-DPB13101 DPA10202-DPB16501 DPA10301-DPB10101 DPA10301-DPB10201 DPA10301-DPB10202 DPA10301-DPB10401 DPA10301-DPB10402 DPA10301-DPB110501 DPA10301-DPB110601 DPA10301-DPB11801 DPA10301-DPB12301 DPA10301-DPB13901 DPA10301-DPB14001 DPA10301-DPB14901 DPA10301-DPB15501 DPA10301-DPB16501 DPA10301-DPB17501 DPA10301-DPB18001 DPA10401-DPB10101 DPA10401-DPB10201; note = HLAs: DPA10401-DPB10202 DPA10401-DPB10402 DPA10401-DPB10501 DPA10401-DPB110501 DPA10401-DPB14901
PPWLWSGFELAPDK

SEQ ID NO: 6660 - protein, 20 aa, synthetic construct
  source 1..20: note = Seed: KEPPFLWMGYELHPDKWTVQ; note = HLAs: DRB1_0101 DPA10103-DPB10101 DPA10103-DPB10201 DPA10103-DPB10202 DPA10103-DPB10401 DPA10103-DPB10402 DPA10103-DPB10501 DPA10103-DPB110501 DPA10103-DPB112601 DPA10103-DPB11501 DPA10103-DPB11601 DPA10103-DPB11801 DPA10103-DPB11901 DPA10103-DPB12301 DPA10103-DPB13101 DPA10103-DPB13401 DPA10103-DPB13901 DPA10103-DPB14001 DPA10103-DPB14101 DPA10103-DPB14801 DPA10103-DPB14901 DPA10103-DPB15001 DPA10103-DPB15101 DPA10103-DPB15501 DPA10103-DPB15901 DPA10103-DPB18001 DPA10104-DPB10101 DPA10104-DPB11501 DPA10105-DPB10101 DPA10105-DPB10401 DPA10105-DPB11801 DPA10105-DPB15001 DPA10106-DPB10101 DPA10201-DPB10101 DPA10201-DPB10201 DPA10201-DPB10202 DPA10201-DPB10401 DPA10201-DPB10501 DPA10201-DPB110601 DPA10201-DPB11501 DPA10201-DPB11601 DPA10201-DPB11901 DPA10201-DPB13401 DPA10201-DPB15501 DPA10202-DPB10101 DPA10202-DPB10201 DPA10202-DPB10202 DPA10202-DPB10401 DPA10202-DPB10501 DPA10202-DPB110601 DPA10202-DPB11101 DPA10202-DPB11301 DPA10202-DPB11801 DPA10202-DPB11901 DPA10202-DPB13101; note = HLAs: DPA10202-DPB13801 DPA10202-DPB15501 DPA10202-DPB16501 DPA10301-DPB10101 DPA10301-DPB10201 DPA10301-DPB10202 DPA10301-DPB10401 DPA10301-DPB10402 DPA10301-DPB110501 DPA10301-DPB110601 DPA10301-DPB11101 DPA10301-DPB11301 DPA10301-DPB11801 DPA10301-DPB12301 DPA10301-DPB13901 DPA10301-DPB14001 DPA10301-DPB14901 DPA10301-DPB15501 DPA10301-DPB16501 DPA10301-DPB17501 DPA10301-DPB18001 DPA10401-DPB10101 DPA10401-DPB10201 DPA10401-DPB10202 DPA10401-DPB10402 DPA10401-DPB10501 DPA10401-DPB110501 DPA10401-DPB14901
KEPPFLWLGFELYPDKWTVQ

SEQ ID NO: 6661 - protein, 14 aa, synthetic construct
  source 1..14: note = Seed: PPFLWMGYELHPDK; note = HLAs: DPA10103-DPB10101 DPA10103-DPB10201 DPA10103-DPB10202 DPA10103-DPB10401 DPA10103-DPB112601 DPA10103-DPB11501 DPA10103-DPB11601 DPA10103-DPB11901 DPA10103-DPB12301 DPA10103-DPB13101 DPA10103-DPB13401 DPA10103-DPB13901 DPA10103-DPB14001 DPA10103-DPB14101 DPA10103-DPB14801 DPA10103-DPB15001 DPA10103-DPB15901 DPA10104-DPB10101 DPA10104-DPB11501 DPA10105-DPB10101 DPA10105-DPB10401 DPA10105-DPB15001 DPA10106-DPB10101 DPA10201-DPB10101 DPA10201-DPB110601 DPA10201-DPB11501 DPA10201-DPB11601 DPA10201-DPB11901 DPA10202-DPB10101 DPA10202-DPB10201 DPA10202-DPB10202 DPA10202-DPB10401 DPA10202-DPB110601 DPA10202-DPB11901 DPA10202-DPB13101 DPA10202-DPB16501 DPA10301-DPB10101 DPA10301-DPB10201 DPA10301-DPB10202 DPA10301-DPB10401 DPA10301-DPB10402 DPA10301-DPB110501 DPA10301-DPB110601 DPA10301-DPB11801 DPA10301-DPB12301 DPA10301-DPB13901 DPA10301-DPB14001 DPA10301-DPB14901 DPA10301-DPB15501 DPA10301-DPB16501 DPA10301-DPB17501 DPA10301-DPB18001 DPA10401-DPB10101 DPA10401-DPB10201; note = HLAs: DPA10401-DPB10202 DPA10401-DPB10402 DPA10401-DPB10501 DPA10401-DPB110501 DPA10401-DPB14901
PPILWEGFELMPDK

SEQ ID NO: 6662 - protein, 14 aa, synthetic construct
  source 1..14: note = Seed: PPFLWMGYELHPDK; note = HLAs: DPA10103-DPB10101 DPA10103-DPB10201 DPA10103-DPB10202 DPA10103-DPB10401 DPA10103-DPB112601 DPA10103-DPB11501 DPA10103-DPB11601 DPA10103-DPB11901 DPA10103-DPB12301 DPA10103-DPB13101 DPA10103-DPB13401 DPA10103-DPB13901 DPA10103-DPB14001 DPA10103-DPB14101 DPA10103-DPB14801 DPA10103-DPB15001 DPA10103-DPB15901 DPA10104-DPB10101 DPA10104-DPB11501 DPA10105-DPB10101 DPA10105-DPB10401 DPA10105-DPB15001 DPA10106-DPB10101 DPA10201-DPB10101 DPA10201-DPB110601 DPA10201-DPB11501 DPA10201-DPB11601 DPA10201-DPB11901 DPA10202-DPB10101 DPA10202-DPB10201 DPA10202-DPB10202 DPA10202-DPB10401 DPA10202-DPB110601 DPA10202-DPB11901 DPA10202-DPB13101 DPA10202-DPB16501 DPA10301-DPB10101 DPA10301-DPB10201 DPA10301-DPB10202 DPA10301-DPB10401 DPA10301-DPB10402 DPA10301-DPB110501 DPA10301-DPB110601 DPA10301-DPB11801 DPA10301-DPB12301 DPA10301-DPB13901 DPA10301-DPB14001 DPA10301-DPB14901 DPA10301-DPB16501 DPA10301-DPB17501 DPA10301-DPB18001 DPA10401-DPB10101 DPA10401-DPB10201 DPA10401-DPB10202; note = HLAs: DPA10401-DPB10402 DPA10401-DPB10501 DPA10401-DPB110501 DPA10401-DPB14901
PPLLWKGFELLPDK

SEQ ID NO: 6663 - protein, 14 aa, synthetic construct
  source 1..14: note = Seed: PPFLWMGYELHPDK; note = HLAs: DPA10103-DPB10101 DPA10103-DPB10201 DPA10103-DPB10202 DPA10103-DPB10401 DPA10103-DPB112601 DPA10103-DPB11501 DPA10103-DPB11601 DPA10103-DPB11901 DPA10103-DPB12301 DPA10103-DPB13101 DPA10103-DPB13401 DPA10103-DPB13901 DPA10103-DPB14001 DPA10103-DPB14101 DPA10103-DPB14801 DPA10103-DPB15001 DPA10103-DPB15901 DPA10104-DPB10101 DPA10104-DPB11501 DPA10105-DPB10101 DPA10105-DPB10401 DPA10105-DPB15001 DPA10106-DPB10101 DPA10201-DPB10101 DPA10201-DPB110601 DPA10201-DPB11501 DPA10201-DPB11601 DPA10201-DPB11901 DPA10202-DPB10101 DPA10202-DPB10201 DPA10202-DPB10202 DPA10202-DPB10401 DPA10202-DPB110601 DPA10202-DPB11901 DPA10202-DPB13101 DPA10202-DPB16501 DPA10301-DPB10101 DPA10301-DPB10201 DPA10301-DPB10202 DPA10301-DPB10401 DPA10301-DPB10402 DPA10301-DPB110501 DPA10301-DPB110601 DPA10301-DPB11801 DPA10301-DPB12301 DPA10301-DPB13901 DPA10301-DPB14001 DPA10301-DPB14901 DPA10301-DPB15501 DPA10301-DPB16501 DPA10301-DPB17501 DPA10301-DPB18001 DPA10401-DPB10101 DPA10401-DPB10201; note = HLAs: DPA10401-DPB10202 DPA10401-DPB10402 DPA10401-DPB10501 DPA10401-DPB110501 DPA10401-DPB14901
PPFLWNGFELSPDK

SEQ ID NO: 6664 - protein, 14 aa, synthetic construct
  source 1..14: note = Seed: PPFLWMGYELHPDK; note = HLAs: DRB1_1001 DPA10103-DPB10201 DPA10103-DPB10202 DPA10103-DPB10401 DPA10103-DPB112601 DPA10103-DPB11501 DPA10103-DPB11601 DPA10103-DPB11901 DPA10103-DPB12301 DPA10103-DPB13401 DPA10103-DPB13901 DPA10103-DPB14001 DPA10103-DPB14101 DPA10103-DPB14801 DPA10103-DPB15001 DPA10103-DPB15901 DPA10104-DPB11501 DPA10105-DPB10401 DPA10105-DPB15001 DPA10106-DPB10101 DPA10201-DPB10101 DPA10201-DPB110601 DPA10201-DPB11501 DPA10201-DPB11601 DPA10201-DPB11901 DPA10202-DPB10101 DPA10202-DPB10201 DPA10202-DPB10202 DPA10202-DPB110601 DPA10202-DPB11901 DPA10202-DPB13101 DPA10202-DPB16501 DPA10301-DPB10101 DPA10301-DPB10201 DPA10301-DPB10202 DPA10301-DPB10401 DPA10301-DPB10402 DPA10301-DPB110501 DPA10301-DPB110601 DPA10301-DPB11801 DPA10301-DPB12301 DPA10301-DPB13901 DPA10301-DPB14001 DPA10301-DPB14901 DPA10301-DPB15501 DPA10301-DPB17501 DPA10301-DPB18001 DPA10401-DPB10101 DPA10401-DPB10201 DPA10401-DPB10202 DPA10401-DPB10402 DPA10401-DPB10501 DPA10401-DPB110501 DPA10401-DPB14901
PPFLWAGIELLPDK

SEQ ID NO: 6665 - protein, 14 aa, synthetic construct
  source 1..14: note = Seed: PPFLWMGYELHPDK; note = HLAs: DRB1_1001 DPA10103-DPB10101 DPA10103-DPB10201 DPA10103-DPB10202 DPA10103-DPB10401 DPA10103-DPB112601 DPA10103-DPB11501 DPA10103-DPB11601 DPA10103-DPB11901 DPA10103-DPB12301 DPA10103-DPB13101 DPA10103-DPB13401 DPA10103-DPB13901 DPA10103-DPB14001 DPA10103-DPB14101 DPA10103-DPB14801 DPA10103-DPB15001 DPA10103-DPB15901 DPA10104-DPB10101 DPA10104-DPB11501 DPA10105-DPB10101 DPA10105-DPB10401 DPA10105-DPB15001 DPA10106-DPB10101 DPA10201-DPB10101 DPA10201-DPB110601 DPA10201-DPB11501 DPA10201-DPB11601 DPA10201-DPB11901 DPA10202-DPB10101 DPA10202-DPB10201 DPA10202-DPB10202 DPA10202-DPB10401 DPA10202-DPB110601 DPA10202-DPB11901 DPA10202-DPB13101 DPA10202-DPB16501 DPA10301-DPB10101 DPA10301-DPB10201 DPA10301-DPB10202 DPA10301-DPB10401 DPA10301-DPB10402 DPA10301-DPB110501 DPA10301-DPB110601 DPA10301-DPB11801 DPA10301-DPB12301 DPA10301-DPB13901 DPA10301-DPB14001 DPA10301-DPB14901 DPA10301-DPB15501 DPA10301-DPB16501 DPA10301-DPB17501 DPA10301-DPB18001 DPA10401-DPB10101 DPA10401-DPB10201; note = HLAs: DPA10401-DPB10202 DPA10401-DPB10402 DPA10401-DPB10501 DPA10401-DPB110501 DPA10401-DPB14901
PPLLWMGFELVPDK

SEQ ID NO: 6666 - protein, 14 aa, synthetic construct
  source 1..14: note = Seed: PPFLWMGYELHPDK; note = HLAs: DRB1_1001 DPA10103-DPB10101 DPA10103-DPB10201 DPA10103-DPB10202 DPA10103-DPB10401 DPA10103-DPB112601 DPA10103-DPB11501 DPA10103-DPB11601 DPA10103-DPB11901 DPA10103-DPB12301 DPA10103-DPB13101 DPA10103-DPB13401 DPA10103-DPB13901 DPA10103-DPB14001 DPA10103-DPB14101 DPA10103-DPB14801 DPA10103-DPB15001 DPA10103-DPB15901 DPA10104-DPB10101 DPA10104-DPB11501 DPA10105-DPB10101 DPA10105-DPB10401 DPA10105-DPB15001 DPA10106-DPB10101 DPA10201-DPB10101 DPA10201-DPB110601 DPA10201-DPB11501 DPA10201-DPB11601 DPA10201-DPB11901 DPA10202-DPB10101 DPA10202-DPB10201 DPA10202-DPB10202 DPA10202-DPB10401 DPA10202-DPB110601 DPA10202-DPB11901 DPA10202-DPB13101 DPA10202-DPB16501 DPA10301-DPB10101 DPA10301-DPB10201 DPA10301-DPB10202 DPA10301-DPB10401 DPA10301-DPB10402 DPA10301-DPB110501 DPA10301-DPB110601 DPA10301-DPB11801 DPA10301-DPB12301 DPA10301-DPB13901 DPA10301-DPB14001 DPA10301-DPB14901 DPA10301-DPB15501 DPA10301-DPB16501 DPA10301-DPB17501 DPA10301-DPB18001 DPA10401-DPB10101 DPA10401-DPB10201; note = HLAs: DPA10401-DPB10202 DPA10401-DPB10402 DPA10401-DPB10501 DPA10401-DPB110501 DPA10401-DPB14901
PPFLWLGFELEPDK

SEQ ID NO: 6667 - protein, 14 aa, synthetic construct
  source 1..14: note = Seed: PPFLWMGYELHPDK; note = HLAs: DPA10103-DPB10101 DPA10103-DPB10201 DPA10103-DPB10202 DPA10103-DPB10401 DPA10103-DPB112601 DPA10103-DPB11501 DPA10103-DPB11601 DPA10103-DPB11901 DPA10103-DPB12301 DPA10103-DPB13101 DPA10103-DPB13401 DPA10103-DPB13901 DPA10103-DPB14001 DPA10103-DPB14101 DPA10103-DPB14801 DPA10103-DPB15001 DPA10103-DPB15901 DPA10104-DPB10101 DPA10104-DPB11501 DPA10105-DPB10101 DPA10105-DPB10401 DPA10105-DPB15001 DPA10106-DPB10101 DPA10201-DPB10101 DPA10201-DPB110601 DPA10201-DPB11501 DPA10201-DPB11601 DPA10201-DPB11901 DPA10202-DPB10101 DPA10202-DPB10201 DPA10202-DPB10202 DPA10202-DPB10401 DPA10202-DPB110601 DPA10202-DPB11901 DPA10202-DPB13101 DPA10202-DPB16501 DPA10301-DPB10101 DPA10301-DPB10201 DPA10301-DPB10202 DPA10301-DPB10401 DPA10301-DPB10402 DPA10301-DPB110501 DPA10301-DPB110601 DPA10301-DPB11801 DPA10301-DPB12301 DPA10301-DPB13901 DPA10301-DPB14001 DPA10301-DPB14901 DPA10301-DPB15501 DPA10301-DPB16501 DPA10301-DPB17501 DPA10301-DPB18001 DPA10401-DPB10101 DPA10401-DPB10201; note = HLAs: DPA10401-DPB10202 DPA10401-DPB10402 DPA10401-DPB10501 DPA10401-DPB110501 DPA10401-DPB14901
PPLLWHGFELFPDK

SEQ ID NO: 6668 - protein, 14 aa, synthetic construct
  source 1..14: note = Seed: PPFLWMGYELHPDK; note = HLAs: DPA10103-DPB10101 DPA10103-DPB10201 DPA10103-DPB10202 DPA10103-DPB10401 DPA10103-DPB112601 DPA10103-DPB11501 DPA10103-DPB11601 DPA10103-DPB11901 DPA10103-DPB12301 DPA10103-DPB13101 DPA10103-DPB13401 DPA10103-DPB13901 DPA10103-DPB14001 DPA10103-DPB14101 DPA10103-DPB14801 DPA10103-DPB15001 DPA10103-DPB15901 DPA10104-DPB10101 DPA10104-DPB11501 DPA10105-DPB10101 DPA10105-DPB10401 DPA10105-DPB15001 DPA10106-DPB10101 DPA10201-DPB10101 DPA10201-DPB110601 DPA10201-DPB11501 DPA10201-DPB11601 DPA10201-DPB11901 DPA10202-DPB10101 DPA10202-DPB10201 DPA10202-DPB10202 DPA10202-DPB10401 DPA10202-DPB110601 DPA10202-DPB11901 DPA10202-DPB13101 DPA10202-DPB16501 DPA10301-DPB10101 DPA10301-DPB10201 DPA10301-DPB10202 DPA10301-DPB10401 DPA10301-DPB10402 DPA10301-DPB110501 DPA10301-DPB110601 DPA10301-DPB11801 DPA10301-DPB12301 DPA10301-DPB13901 DPA10301-DPB14001 DPA10301-DPB14901 DPA10301-DPB15501 DPA10301-DPB16501 DPA10301-DPB17501 DPA10301-DPB18001 DPA10401-DPB10101 DPA10401-DPB10201; note = HLAs: DPA10401-DPB10202 DPA10401-DPB10402 DPA10401-DPB10501 DPA10401-DPB110501 DPA10401-DPB14901
PPLLWEGFELFPDK

SEQ ID NO: 6669 - protein, 14 aa, synthetic construct
  source 1..14: note = Seed: PPFLWMGYELHPDK; note = HLAs: DPA10103-DPB10101 DPA10103-DPB10201 DPA10103-DPB10202 DPA10103-DPB10401 DPA10103-DPB112601 DPA10103-DPB11501 DPA10103-DPB11601 DPA10103-DPB11901 DPA10103-DPB12301 DPA10103-DPB13101 DPA10103-DPB13401 DPA10103-DPB13901 DPA10103-DPB14001 DPA10103-DPB14101 DPA10103-DPB14801 DPA10103-DPB15001 DPA10103-DPB15901 DPA10104-DPB10101 DPA10104-DPB11501 DPA10105-DPB10101 DPA10105-DPB10401 DPA10105-DPB15001 DPA10106-DPB10101 DPA10201-DPB10101 DPA10201-DPB110601 DPA10201-DPB11501 DPA10201-DPB11601 DPA10201-DPB11901 DPA10202-DPB10101 DPA10202-DPB10201 DPA10202-DPB10202 DPA10202-DPB10401 DPA10202-DPB110601 DPA10202-DPB11901 DPA10202-DPB13101 DPA10202-DPB16501 DPA10301-DPB10101 DPA10301-DPB10201 DPA10301-DPB10202 DPA10301-DPB10401 DPA10301-DPB10402 DPA10301-DPB110501 DPA10301-DPB110601 DPA10301-DPB11801 DPA10301-DPB12301 DPA10301-DPB13901 DPA10301-DPB14001 DPA10301-DPB14901 DPA10301-DPB15501 DPA10301-DPB16501 DPA10301-DPB17501 DPA10301-DPB18001 DPA10401-DPB10101 DPA10401-DPB10201; note = HLAs: DPA10401-DPB10202 DPA10401-DPB10402 DPA10401-DPB10501 DPA10401-DPB110501 DPA10401-DPB14901
PPMLWTGFELFPDK

SEQ ID NO: 6670 - protein, 14 aa, synthetic construct
  source 1..14: note = Seed: PPFLWMGYELHPDK; note = HLAs: DPA10103-DPB10101 DPA10103-DPB10201 DPA10103-DPB10202 DPA10103-DPB10401 DPA10103-DPB112601 DPA10103-DPB11501 DPA10103-DPB11601 DPA10103-DPB11901 DPA10103-DPB12301 DPA10103-DPB13101 DPA10103-DPB13401 DPA10103-DPB13901 DPA10103-DPB14001 DPA10103-DPB14101 DPA10103-DPB14801 DPA10103-DPB15001 DPA10103-DPB15901 DPA10104-DPB10101 DPA10104-DPB11501 DPA10105-DPB10101 DPA10105-DPB10401 DPA10105-DPB15001 DPA10106-DPB10101 DPA10201-DPB10101 DPA10201-DPB110601 DPA10201-DPB11501 DPA10201-DPB11601 DPA10201-DPB11901 DPA10202-DPB10101 DPA10202-DPB10201 DPA10202-DPB10202 DPA10202-DPB10401 DPA10202-DPB110601 DPA10202-DPB11901 DPA10202-DPB13101 DPA10202-DPB16501 DPA10301-DPB10101 DPA10301-DPB10201 DPA10301-DPB10202 DPA10301-DPB10401 DPA10301-DPB10402 DPA10301-DPB110501 DPA10301-DPB110601 DPA10301-DPB11801 DPA10301-DPB12301 DPA10301-DPB13901 DPA10301-DPB14001 DPA10301-DPB14901 DPA10301-DPB15501 DPA10301-DPB16501 DPA10301-DPB17501 DPA10301-DPB18001 DPA10401-DPB10101 DPA10401-DPB10201; note = HLAs: DPA10401-DPB10202 DPA10401-DPB10402 DPA10401-DPB10501 DPA10401-DPB110501 DPA10401-DPB14901
PPYLWSGYELLPDK

SEQ ID NO: 6671 - protein, 14 aa, synthetic construct
  source 1..14: note = Seed: PPFLWMGYELHPDK; note = HLAs: DPA10103-DPB10101 DPA10103-DPB10201 DPA10103-DPB10202 DPA10103-DPB10401 DPA10103-DPB112601 DPA10103-DPB11501 DPA10103-DPB11601 DPA10103-DPB11901 DPA10103-DPB12301 DPA10103-DPB13101 DPA10103-DPB13401 DPA10103-DPB13901 DPA10103-DPB14001 DPA10103-DPB14101 DPA10103-DPB14801 DPA10103-DPB15001 DPA10103-DPB15901 DPA10104-DPB10101 DPA10104-DPB11501 DPA10105-DPB10101 DPA10105-DPB10401 DPA10105-DPB15001 DPA10106-DPB10101 DPA10201-DPB10101 DPA10201-DPB110601 DPA10201-DPB11501 DPA10201-DPB11601 DPA10201-DPB11901 DPA10202-DPB10101 DPA10202-DPB10201 DPA10202-DPB10202 DPA10202-DPB10401 DPA10202-DPB110601 DPA10202-DPB11901 DPA10202-DPB13101 DPA10202-DPB16501 DPA10301-DPB10101 DPA10301-DPB10201 DPA10301-DPB10202 DPA10301-DPB10401 DPA10301-DPB10402 DPA10301-DPB110501 DPA10301-DPB110601 DPA10301-DPB11801 DPA10301-DPB12301 DPA10301-DPB13901 DPA10301-DPB14001 DPA10301-DPB14901 DPA10301-DPB15501 DPA10301-DPB16501 DPA10301-DPB17501 DPA10301-DPB18001 DPA10401-DPB10101 DPA10401-DPB10201; note = HLAs: DPA10401-DPB10202 DPA10401-DPB10402 DPA10401-DPB10501 DPA10401-DPB110501 DPA10401-DPB14901
PPLLWSGFELYPDK

SEQ ID NO: 6672 - protein, 20 aa, synthetic construct
  source 1..20: note = Seed: KEPPFLWMGYELHPDKWTVQ; note = HLAs: DRB1_0101 DPA10103-DPB10101 DPA10103-DPB10201 DPA10103-DPB10202 DPA10103-DPB10401 DPA10103-DPB10402 DPA10103-DPB10501 DPA10103-DPB110501 DPA10103-DPB112601 DPA10103-DPB11501 DPA10103-DPB11601 DPA10103-DPB11801 DPA10103-DPB11901 DPA10103-DPB12301 DPA10103-DPB13101 DPA10103-DPB13401 DPA10103-DPB13901 DPA10103-DPB14001 DPA10103-DPB14101 DPA10103-DPB14801 DPA10103-DPB14901 DPA10103-DPB15001 DPA10103-DPB15101 DPA10103-DPB15501 DPA10103-DPB15901 DPA10103-DPB18001 DPA10104-DPB10101 DPA10104-DPB11501 DPA10105-DPB10101 DPA10105-DPB10401 DPA10105-DPB11801 DPA10105-DPB15001 DPA10106-DPB10101 DPA10201-DPB10101 DPA10201-DPB10201 DPA10201-DPB10202 DPA10201-DPB10401 DPA10201-DPB10501 DPA10201-DPB110601 DPA10201-DPB11501 DPA10201-DPB11601 DPA10201-DPB11901 DPA10201-DPB13401 DPA10201-DPB15501 DPA10202-DPB10101 DPA10202-DPB10201 DPA10202-DPB10202 DPA10202-DPB10401 DPA10202-DPB10501 DPA10202-DPB110601 DPA10202-DPB11101 DPA10202-DPB11301 DPA10202-DPB11801 DPA10202-DPB11901 DPA10202-DPB13101; note = HLAs: DPA10202-DPB13801 DPA10202-DPB15501 DPA10202-DPB16501 DPA10301-DPB10101 DPA10301-DPB10201 DPA10301-DPB10202 DPA10301-DPB10401 DPA10301-DPB10402 DPA10301-DPB110501 DPA10301-DPB110601 DPA10301-DPB11101 DPA10301-DPB11301 DPA10301-DPB11801 DPA10301-DPB12301 DPA10301-DPB13901 DPA10301-DPB14001 DPA10301-DPB14901 DPA10301-DPB15501 DPA10301-DPB16501 DPA10301-DPB17501 DPA10301-DPB18001 DPA10401-DPB10101 DPA10401-DPB10201 DPA10401-DPB10202 DPA10401-DPB10402 DPA10401-DPB10501 DPA10401-DPB110501 DPA10401-DPB14901
KEPPFLWFGYELLPDKWTVQ

SEQ ID NO: 6673 - protein, 20 aa, synthetic construct
  source 1..20: note = Seed: KEPPFLWMGYELHPDKWTVQ; note = HLAs: DRB1_0101 DPA10103-DPB10101 DPA10103-DPB10201 DPA10103-DPB10202 DPA10103-DPB10401 DPA10103-DPB10402 DPA10103-DPB10501 DPA10103-DPB110501 DPA10103-DPB112601 DPA10103-DPB11501 DPA10103-DPB11601 DPA10103-DPB11801 DPA10103-DPB11901 DPA10103-DPB12301 DPA10103-DPB13101 DPA10103-DPB13401 DPA10103-DPB13901 DPA10103-DPB14001 DPA10103-DPB14101 DPA10103-DPB14801 DPA10103-DPB14901 DPA10103-DPB15001 DPA10103-DPB15101 DPA10103-DPB15501 DPA10103-DPB15901 DPA10103-DPB18001 DPA10104-DPB10101 DPA10104-DPB11501 DPA10105-DPB10101 DPA10105-DPB10401 DPA10105-DPB11801 DPA10105-DPB15001 DPA10106-DPB10101 DPA10201-DPB10101 DPA10201-DPB10201 DPA10201-DPB10202 DPA10201-DPB10401 DPA10201-DPB10501 DPA10201-DPB110601 DPA10201-DPB11501 DPA10201-DPB11601 DPA10201-DPB11901 DPA10201-DPB13401 DPA10201-DPB15501 DPA10202-DPB10101 DPA10202-DPB10201 DPA10202-DPB10202 DPA10202-DPB10401 DPA10202-DPB10501 DPA10202-DPB110601 DPA10202-DPB11101 DPA10202-DPB11301 DPA10202-DPB11801 DPA10202-DPB11901 DPA10202-DPB13101; note = HLAs: DPA10202-DPB13801 DPA10202-DPB15501 DPA10202-DPB16501 DPA10301-DPB10101 DPA10301-DPB10201 DPA10301-DPB10202 DPA10301-DPB10401 DPA10301-DPB10402 DPA10301-DPB110501 DPA10301-DPB110601 DPA10301-DPB11101 DPA10301-DPB11301 DPA10301-DPB11801 DPA10301-DPB12301 DPA10301-DPB13901 DPA10301-DPB14001 DPA10301-DPB14901 DPA10301-DPB15501 DPA10301-DPB16501 DPA10301-DPB17501 DPA10301-DPB18001 DPA10401-DPB10101 DPA10401-DPB10201 DPA10401-DPB10202 DPA10401-DPB10402 DPA10401-DPB10501 DPA10401-DPB110501 DPA10401-DPB14901
KEPPFLWSGFELRPDKWTVQ

SEQ ID NO: 6674 - protein, 14 aa, synthetic construct
  source 1..14: note = Seed: PPFLWMGYELHPDK; note = HLAs: DPA10103-DPB10101 DPA10103-DPB10201 DPA10103-DPB10202 DPA10103-DPB10401 DPA10103-DPB112601 DPA10103-DPB11501 DPA10103-DPB11601 DPA10103-DPB11901 DPA10103-DPB12301 DPA10103-DPB13101 DPA10103-DPB13401 DPA10103-DPB13901 DPA10103-DPB14001 DPA10103-DPB14101 DPA10103-DPB14801 DPA10103-DPB15001 DPA10103-DPB15901 DPA10104-DPB10101 DPA10104-DPB11501 DPA10105-DPB10101 DPA10105-DPB10401 DPA10105-DPB15001 DPA10106-DPB10101 DPA10201-DPB10101 DPA10201-DPB110601 DPA10201-DPB11501 DPA10201-DPB11601 DPA10201-DPB11901 DPA10202-DPB10101 DPA10202-DPB10201 DPA10202-DPB10202 DPA10202-DPB10401 DPA10202-DPB110601 DPA10202-DPB11901 DPA10202-DPB13101 DPA10202-DPB16501 DPA10301-DPB10101 DPA10301-DPB10201 DPA10301-DPB10202 DPA10301-DPB10401 DPA10301-DPB10402 DPA10301-DPB110501 DPA10301-DPB110601 DPA10301-DPB11801 DPA10301-DPB12301 DPA10301-DPB13901 DPA10301-DPB14001 DPA10301-DPB14901 DPA10301-DPB15501 DPA10301-DPB16501 DPA10301-DPB17501 DPA10301-DPB18001 DPA10401-DPB10101 DPA10401-DPB10201; note = HLAs: DPA10401-DPB10202 DPA10401-DPB10402 DPA10401-DPB10501 DPA10401-DPB110501 DPA10401-DPB14901
PPFLWDGFELMPDK

SEQ ID NO: 6675 - protein, 14 aa, synthetic construct
  source 1..14: note = Seed: PPFLWMGYELHPDK; note = HLAs: DPA10103-DPB10101 DPA10103-DPB10201 DPA10103-DPB10202 DPA10103-DPB10401 DPA10103-DPB112601 DPA10103-DPB11501 DPA10103-DPB11601 DPA10103-DPB11901 DPA10103-DPB12301 DPA10103-DPB13101 DPA10103-DPB13401 DPA10103-DPB13901 DPA10103-DPB14001 DPA10103-DPB14101 DPA10103-DPB14801 DPA10103-DPB15901 DPA10104-DPB10101 DPA10104-DPB11501 DPA10105-DPB10101 DPA10105-DPB10401 DPA10106-DPB10101 DPA10201-DPB10101 DPA10201-DPB110601 DPA10201-DPB11501 DPA10201-DPB11601 DPA10201-DPB11901 DPA10202-DPB10101 DPA10202-DPB10201 DPA10202-DPB10202 DPA10202-DPB10401 DPA10202-DPB110601 DPA10202-DPB11901 DPA10202-DPB13101 DPA10202-DPB16501 DPA10301-DPB10101 DPA10301-DPB10201 DPA10301-DPB10202 DPA10301-DPB10401 DPA10301-DPB10402 DPA10301-DPB110501 DPA10301-DPB110601 DPA10301-DPB11801 DPA10301-DPB12301 DPA10301-DPB13901 DPA10301-DPB14001 DPA10301-DPB14901 DPA10301-DPB16501 DPA10301-DPB17501 DPA10301-DPB18001 DPA10401-DPB10101 DPA10401-DPB10201 DPA10401-DPB10202 DPA10401-DPB10402 DPA10401-DPB10501; note = HLAs: DPA10401-DPB110501 DPA10401-DPB14901
PPLLWFGFELLPDK

SEQ ID NO: 6676 - protein, 14 aa, synthetic construct
  source 1..14: note = Seed: PPFLWMGYELHPDK; note = HLAs: DPA10103-DPB10101 DPA10103-DPB10201 DPA10103-DPB10202 DPA10103-DPB10401 DPA10103-DPB112601 DPA10103-DPB11501 DPA10103-DPB11601 DPA10103-DPB11901 DPA10103-DPB12301 DPA10103-DPB13101 DPA10103-DPB13401 DPA10103-DPB13901 DPA10103-DPB14001 DPA10103-DPB14101 DPA10103-DPB14801 DPA10103-DPB15001 DPA10103-DPB15901 DPA10104-DPB10101 DPA10104-DPB11501 DPA10105-DPB10101 DPA10105-DPB10401 DPA10105-DPB15001 DPA10106-DPB10101 DPA10201-DPB10101 DPA10201-DPB110601 DPA10201-DPB11501 DPA10201-DPB11601 DPA10201-DPB11901 DPA10202-DPB10101 DPA10202-DPB10201 DPA10202-DPB10202 DPA10202-DPB10401 DPA10202-DPB110601 DPA10202-DPB11901 DPA10202-DPB13101 DPA10202-DPB16501 DPA10301-DPB10101 DPA10301-DPB10201 DPA10301-DPB10202 DPA10301-DPB10401 DPA10301-DPB10402 DPA10301-DPB110501 DPA10301-DPB110601 DPA10301-DPB11801 DPA10301-DPB12301 DPA10301-DPB13901 DPA10301-DPB14001 DPA10301-DPB14901 DPA10301-DPB15501 DPA10301-DPB16501 DPA10301-DPB17501 DPA10301-DPB18001 DPA10401-DPB10101 DPA10401-DPB10201; note = HLAs: DPA10401-DPB10202 DPA10401-DPB10402 DPA10401-DPB10501 DPA10401-DPB110501 DPA10401-DPB14901
PPFLWSGLELFPDK

SEQ ID NO: 6677 - protein, 20 aa, synthetic construct
  source 1..20: note = Seed: KEPPFLWMGYELHPDKWTVQ; note = HLAs: DRB1_0101 DRB1_1001 DPA10103-DPB10101 DPA10103-DPB10201 DPA10103-DPB10202 DPA10103-DPB10401 DPA10103-DPB10402 DPA10103-DPB10501 DPA10103-DPB110501 DPA10103-DPB112601 DPA10103-DPB11501 DPA10103-DPB11601 DPA10103-DPB11801 DPA10103-DPB11901 DPA10103-DPB12301 DPA10103-DPB13101 DPA10103-DPB13401 DPA10103-DPB13901 DPA10103-DPB14001 DPA10103-DPB14101 DPA10103-DPB14801 DPA10103-DPB14901 DPA10103-DPB15001 DPA10103-DPB15101 DPA10103-DPB15501 DPA10103-DPB15901 DPA10103-DPB18001 DPA10104-DPB10101 DPA10104-DPB11501 DPA10105-DPB10101 DPA10105-DPB10401 DPA10105-DPB11801 DPA10105-DPB15001 DPA10106-DPB10101 DPA10201-DPB10101 DPA10201-DPB10201 DPA10201-DPB10202 DPA10201-DPB10401 DPA10201-DPB10501 DPA10201-DPB110601 DPA10201-DPB11501 DPA10201-DPB11601 DPA10201-DPB11901 DPA10201-DPB13401 DPA10201-DPB15501 DPA10202-DPB10101 DPA10202-DPB10201 DPA10202-DPB10202 DPA10202-DPB10401 DPA10202-DPB10501 DPA10202-DPB110601 DPA10202-DPB11101 DPA10202-DPB11301 DPA10202-DPB11801 DPA10202-DPB11901; note = HLAs: DPA10202-DPB13101 DPA10202-DPB13801 DPA10202-DPB15501 DPA10202-DPB16501 DPA10301-DPB10101 DPA10301-DPB10201 DPA10301-DPB10202 DPA10301-DPB10401 DPA10301-DPB10402 DPA10301-DPB110501 DPA10301-DPB110601 DPA10301-DPB11101 DPA10301-DPB11301 DPA10301-DPB11801 DPA10301-DPB12301 DPA10301-DPB13901 DPA10301-DPB14001 DPA10301-DPB14901 DPA10301-DPB15501 DPA10301-DPB16501 DPA10301-DPB17501 DPA10301-DPB18001 DPA10401-DPB10101 DPA10401-DPB10201 DPA10401-DPB10202 DPA10401-DPB10402 DPA10401-DPB10501 DPA10401-DPB110501 DPA10401-DPB14901
KEPPFLWLGFELAPDKWTVQ

SEQ ID NO: 6678 - protein, 20 aa, synthetic construct
  source 1..20: note = Seed: KEPPFLWMGYELHPDKWTVQ; note = HLAs: DPA10103-DPB10101 DPA10103-DPB10201 DPA10103-DPB10202 DPA10103-DPB10401 DPA10103-DPB10402 DPA10103-DPB10501 DPA10103-DPB110501 DPA10103-DPB112601 DPA10103-DPB11501 DPA10103-DPB11601 DPA10103-DPB11801 DPA10103-DPB11901 DPA10103-DPB12301 DPA10103-DPB13101 DPA10103-DPB13401 DPA10103-DPB13901 DPA10103-DPB14001 DPA10103-DPB14101 DPA10103-DPB14801 DPA10103-DPB14901 DPA10103-DPB15001 DPA10103-DPB15101 DPA10103-DPB15501 DPA10103-DPB15901 DPA10103-DPB18001 DPA10104-DPB10101 DPA10104-DPB11501 DPA10105-DPB10101 DPA10105-DPB10401 DPA10105-DPB11801 DPA10105-DPB15001 DPA10106-DPB10101 DPA10201-DPB10101 DPA10201-DPB10201 DPA10201-DPB10202 DPA10201-DPB10401 DPA10201-DPB10501 DPA10201-DPB110601 DPA10201-DPB11501 DPA10201-DPB11601 DPA10201-DPB11901 DPA10201-DPB13401 DPA10201-DPB15501 DPA10202-DPB10101 DPA10202-DPB10201 DPA10202-DPB10202 DPA10202-DPB10401 DPA10202-DPB10501 DPA10202-DPB110601 DPA10202-DPB11101 DPA10202-DPB11301 DPA10202-DPB11801 DPA10202-DPB11901 DPA10202-DPB13101 DPA10202-DPB13801; note = HLAs: DPA10202-DPB15501 DPA10202-DPB16501 DPA10301-DPB10101 DPA10301-DPB10201 DPA10301-DPB10202 DPA10301-DPB10401 DPA10301-DPB10402 DPA10301-DPB110501 DPA10301-DPB110601 DPA10301-DPB11101 DPA10301-DPB11301 DPA10301-DPB11801 DPA10301-DPB12301 DPA10301-DPB13901 DPA10301-DPB14001 DPA10301-DPB14901 DPA10301-DPB15501 DPA10301-DPB16501 DPA10301-DPB17501 DPA10301-DPB18001 DPA10401-DPB10101 DPA10401-DPB10201 DPA10401-DPB10202 DPA10401-DPB10402 DPA10401-DPB10501 DPA10401-DPB110501 DPA10401-DPB14901
KEPPFLWFGFELYPDKWTVQ

SEQ ID NO: 6679 - protein, 20 aa, synthetic construct
  source 1..20: note = Seed: KEPPFLWMGYELHPDKWTVQ; note = HLAs: DPA10103-DPB10101 DPA10103-DPB10201 DPA10103-DPB10202 DPA10103-DPB10401 DPA10103-DPB10402 DPA10103-DPB10501 DPA10103-DPB110501 DPA10103-DPB112601 DPA10103-DPB11501 DPA10103-DPB11601 DPA10103-DPB11801 DPA10103-DPB11901 DPA10103-DPB12301 DPA10103-DPB13101 DPA10103-DPB13401 DPA10103-DPB13901 DPA10103-DPB14001 DPA10103-DPB14101 DPA10103-DPB14801 DPA10103-DPB14901 DPA10103-DPB15001 DPA10103-DPB15101 DPA10103-DPB15501 DPA10103-DPB15901 DPA10103-DPB18001 DPA10104-DPB10101 DPA10104-DPB11501 DPA10105-DPB10101 DPA10105-DPB10401 DPA10105-DPB11801 DPA10105-DPB15001 DPA10106-DPB10101 DPA10201-DPB10101 DPA10201-DPB10201 DPA10201-DPB10202 DPA10201-DPB10401 DPA10201-DPB10501 DPA10201-DPB110601 DPA10201-DPB11501 DPA10201-DPB11601 DPA10201-DPB11901 DPA10201-DPB13401 DPA10201-DPB15501 DPA10202-DPB10101 DPA10202-DPB10201 DPA10202-DPB10202 DPA10202-DPB10401 DPA10202-DPB10501 DPA10202-DPB110601 DPA10202-DPB11101 DPA10202-DPB11301 DPA10202-DPB11801 DPA10202-DPB11901 DPA10202-DPB13101 DPA10202-DPB13801; note = HLAs: DPA10202-DPB15501 DPA10202-DPB16501 DPA10301-DPB10101 DPA10301-DPB10201 DPA10301-DPB10202 DPA10301-DPB10401 DPA10301-DPB10402 DPA10301-DPB110501 DPA10301-DPB110601 DPA10301-DPB11101 DPA10301-DPB11301 DPA10301-DPB11801 DPA10301-DPB12301 DPA10301-DPB13901 DPA10301-DPB14001 DPA10301-DPB14901 DPA10301-DPB15501 DPA10301-DPB16501 DPA10301-DPB17501 DPA10301-DPB18001 DPA10401-DPB10101 DPA10401-DPB10201 DPA10401-DPB10202 DPA10401-DPB10402 DPA10401-DPB10501 DPA10401-DPB110501 DPA10401-DPB14901
KEPPLLWHGFELMPDKWTVQ

SEQ ID NO: 6680 - protein, 20 aa, synthetic construct
  source 1..20: note = Seed: KEPPFLWMGYELHPDKWTVQ; note = HLAs: DRB1_1001 DPA10103-DPB10101 DPA10103-DPB10201 DPA10103-DPB10202 DPA10103-DPB10401 DPA10103-DPB10402 DPA10103-DPB10501 DPA10103-DPB110501 DPA10103-DPB112601 DPA10103-DPB11501 DPA10103-DPB11601 DPA10103-DPB11801 DPA10103-DPB11901 DPA10103-DPB12301 DPA10103-DPB13101 DPA10103-DPB13401 DPA10103-DPB13901 DPA10103-DPB14001 DPA10103-DPB14101 DPA10103-DPB14801 DPA10103-DPB14901 DPA10103-DPB15001 DPA10103-DPB15101 DPA10103-DPB15501 DPA10103-DPB15901 DPA10103-DPB18001 DPA10104-DPB10101 DPA10104-DPB11501 DPA10105-DPB10101 DPA10105-DPB10401 DPA10105-DPB11801 DPA10105-DPB15001 DPA10106-DPB10101 DPA10201-DPB10101 DPA10201-DPB10201 DPA10201-DPB10202 DPA10201-DPB10401 DPA10201-DPB10501 DPA10201-DPB110601 DPA10201-DPB11501 DPA10201-DPB11601 DPA10201-DPB11901 DPA10201-DPB13401 DPA10201-DPB15501 DPA10202-DPB10101 DPA10202-DPB10201 DPA10202-DPB10202 DPA10202-DPB10401 DPA10202-DPB10501 DPA10202-DPB110601 DPA10202-DPB11101 DPA10202-DPB11301 DPA10202-DPB11801 DPA10202-DPB11901 DPA10202-DPB13101; note = HLAs: DPA10202-DPB13801 DPA10202-DPB15501 DPA10202-DPB16501 DPA10301-DPB10101 DPA10301-DPB10201 DPA10301-DPB10202 DPA10301-DPB10401 DPA10301-DPB10402 DPA10301-DPB110501 DPA10301-DPB110601 DPA10301-DPB11101 DPA10301-DPB11301 DPA10301-DPB11801 DPA10301-DPB12301 DPA10301-DPB13901 DPA10301-DPB14001 DPA10301-DPB14901 DPA10301-DPB15501 DPA10301-DPB16501 DPA10301-DPB17501 DPA10301-DPB18001 DPA10401-DPB10101 DPA10401-DPB10201 DPA10401-DPB10202 DPA10401-DPB10402 DPA10401-DPB10501 DPA10401-DPB110501 DPA10401-DPB14901
KEPPFLWTGYELYPDKWTVQ

SEQ ID NO: 6681 - protein, 20 aa, synthetic construct
  source 1..20: note = Seed: KEPPFLWMGYELHPDKWTVQ; note = HLAs: DPA10103-DPB10101 DPA10103-DPB10201 DPA10103-DPB10202 DPA10103-DPB10401 DPA10103-DPB10402 DPA10103-DPB10501 DPA10103-DPB110501 DPA10103-DPB112601 DPA10103-DPB11501 DPA10103-DPB11601 DPA10103-DPB11801 DPA10103-DPB11901 DPA10103-DPB12301 DPA10103-DPB13101 DPA10103-DPB13401 DPA10103-DPB13901 DPA10103-DPB14001 DPA10103-DPB14101 DPA10103-DPB14801 DPA10103-DPB14901 DPA10103-DPB15001 DPA10103-DPB15101 DPA10103-DPB15501 DPA10103-DPB15901 DPA10103-DPB18001 DPA10104-DPB10101 DPA10104-DPB11501 DPA10105-DPB10101 DPA10105-DPB10401 DPA10105-DPB11801 DPA10105-DPB15001 DPA10106-DPB10101 DPA10201-DPB10101 DPA10201-DPB10201 DPA10201-DPB10202 DPA10201-DPB10401 DPA10201-DPB10501 DPA10201-DPB110601 DPA10201-DPB11501 DPA10201-DPB11601 DPA10201-DPB11901 DPA10201-DPB13401 DPA10201-DPB15501 DPA10202-DPB10101 DPA10202-DPB10201 DPA10202-DPB10202 DPA10202-DPB10401 DPA10202-DPB10501 DPA10202-DPB110601 DPA10202-DPB11101 DPA10202-DPB11301 DPA10202-DPB11801 DPA10202-DPB11901 DPA10202-DPB13101 DPA10202-DPB13801; note = HLAs: DPA10202-DPB15501 DPA10202-DPB16501 DPA10301-DPB10101 DPA10301-DPB10201 DPA10301-DPB10202 DPA10301-DPB10401 DPA10301-DPB10402 DPA10301-DPB110501 DPA10301-DPB110601 DPA10301-DPB11101 DPA10301-DPB11301 DPA10301-DPB11801 DPA10301-DPB12301 DPA10301-DPB13901 DPA10301-DPB14001 DPA10301-DPB14901 DPA10301-DPB15501 DPA10301-DPB16501 DPA10301-DPB17501 DPA10301-DPB18001 DPA10401-DPB10101 DPA10401-DPB10201 DPA10401-DPB10202 DPA10401-DPB10402 DPA10401-DPB10501 DPA10401-DPB110501 DPA10401-DPB14901
KEPPMLWEGFELLPDKWTVQ

SEQ ID NO: 6682 - protein, 14 aa, synthetic construct
  source 1..14: note = Seed: PPFLWMGYELHPDK; note = HLAs: DPA10103-DPB10101 DPA10103-DPB10201 DPA10103-DPB10202 DPA10103-DPB10401 DPA10103-DPB112601 DPA10103-DPB11501 DPA10103-DPB11601 DPA10103-DPB11901 DPA10103-DPB12301 DPA10103-DPB13101 DPA10103-DPB13401 DPA10103-DPB13901 DPA10103-DPB14001 DPA10103-DPB14101 DPA10103-DPB14801 DPA10103-DPB15001 DPA10103-DPB15901 DPA10104-DPB10101 DPA10104-DPB11501 DPA10105-DPB10101 DPA10105-DPB10401 DPA10105-DPB15001 DPA10106-DPB10101 DPA10201-DPB10101 DPA10201-DPB110601 DPA10201-DPB11501 DPA10201-DPB11601 DPA10201-DPB11901 DPA10202-DPB10101 DPA10202-DPB10201 DPA10202-DPB10202 DPA10202-DPB10401 DPA10202-DPB110601 DPA10202-DPB11901 DPA10202-DPB13101 DPA10202-DPB16501 DPA10301-DPB10101 DPA10301-DPB10201 DPA10301-DPB10202 DPA10301-DPB10401 DPA10301-DPB10402 DPA10301-DPB110501 DPA10301-DPB110601 DPA10301-DPB11801 DPA10301-DPB12301 DPA10301-DPB13901 DPA10301-DPB14001 DPA10301-DPB14901 DPA10301-DPB15501 DPA10301-DPB16501 DPA10301-DPB17501 DPA10301-DPB18001 DPA10401-DPB10101 DPA10401-DPB10201; note = HLAs: DPA10401-DPB10202 DPA10401-DPB10402 DPA10401-DPB10501 DPA10401-DPB110501 DPA10401-DPB14901
PPFLWEGYELFPDK

SEQ ID NO: 6683 - protein, 20 aa, synthetic construct
  source 1..20: note = Seed: KEPPFLWMGYELHPDKWTVQ; note = HLAs: DPA10103-DPB10101 DPA10103-DPB10201 DPA10103-DPB10202 DPA10103-DPB10401 DPA10103-DPB10402 DPA10103-DPB10501 DPA10103-DPB110501 DPA10103-DPB112601 DPA10103-DPB11501 DPA10103-DPB11601 DPA10103-DPB11801 DPA10103-DPB11901 DPA10103-DPB12301 DPA10103-DPB13101 DPA10103-DPB13401 DPA10103-DPB13901 DPA10103-DPB14001 DPA10103-DPB14101 DPA10103-DPB14801 DPA10103-DPB14901 DPA10103-DPB15001 DPA10103-DPB15101 DPA10103-DPB15501 DPA10103-DPB15901 DPA10103-DPB18001 DPA10104-DPB10101 DPA10104-DPB11501 DPA10105-DPB10101 DPA10105-DPB10401 DPA10105-DPB11801 DPA10105-DPB15001 DPA10106-DPB10101 DPA10201-DPB10101 DPA10201-DPB10201 DPA10201-DPB10202 DPA10201-DPB10401 DPA10201-DPB10501 DPA10201-DPB110601 DPA10201-DPB11501 DPA10201-DPB11601 DPA10201-DPB11901 DPA10201-DPB13401 DPA10201-DPB15501 DPA10202-DPB10101 DPA10202-DPB10201 DPA10202-DPB10202 DPA10202-DPB10401 DPA10202-DPB10501 DPA10202-DPB110601 DPA10202-DPB11101 DPA10202-DPB11301 DPA10202-DPB11801 DPA10202-DPB11901 DPA10202-DPB13101 DPA10202-DPB13801; note = HLAs: DPA10202-DPB15501 DPA10202-DPB16501 DPA10301-DPB10101 DPA10301-DPB10201 DPA10301-DPB10202 DPA10301-DPB10401 DPA10301-DPB10402 DPA10301-DPB110501 DPA10301-DPB110601 DPA10301-DPB11101 DPA10301-DPB11301 DPA10301-DPB11801 DPA10301-DPB12301 DPA10301-DPB13901 DPA10301-DPB14001 DPA10301-DPB14901 DPA10301-DPB15501 DPA10301-DPB16501 DPA10301-DPB17501 DPA10301-DPB18001 DPA10401-DPB10101 DPA10401-DPB10201 DPA10401-DPB10202 DPA10401-DPB10402 DPA10401-DPB10501 DPA10401-DPB110501 DPA10401-DPB14901
KEPPILWTGYELLPDKWTVQ

SEQ ID NO: 6684 - protein, 14 aa, synthetic construct
  source 1..14: note = Seed: PPFLWMGYELHPDK; note = HLAs: DPA10103-DPB10201 DPA10103-DPB10202 DPA10103-DPB10401 DPA10103-DPB112601 DPA10103-DPB11501 DPA10103-DPB11601 DPA10103-DPB11901 DPA10103-DPB12301 DPA10103-DPB13401 DPA10103-DPB13901 DPA10103-DPB14001 DPA10103-DPB14101 DPA10103-DPB14801 DPA10103-DPB15901 DPA10104-DPB11501 DPA10105-DPB10401 DPA10201-DPB110601 DPA10201-DPB11501 DPA10201-DPB11601 DPA10201-DPB11901 DPA10202-DPB10201 DPA10202-DPB10202 DPA10202-DPB110601 DPA10202-DPB11901 DPA10202-DPB13101 DPA10301-DPB10201 DPA10301-DPB10202 DPA10301-DPB10401 DPA10301-DPB10402 DPA10301-DPB110501 DPA10301-DPB110601 DPA10301-DPB11801 DPA10301-DPB12301 DPA10301-DPB13901 DPA10301-DPB14001 DPA10301-DPB14901 DPA10301-DPB17501 DPA10301-DPB18001 DPA10401-DPB10201 DPA10401-DPB10202
PPFLWYGLELLPDK

SEQ ID NO: 6685 - protein, 20 aa, synthetic construct
  source 1..20: note = Seed: KEPPFLWMGYELHPDKWTVQ; note = HLAs: DRB1_0101 DRB1_1001 DPA10103-DPB10101 DPA10103-DPB10201 DPA10103-DPB10202 DPA10103-DPB10401 DPA10103-DPB10402 DPA10103-DPB10501 DPA10103-DPB110501 DPA10103-DPB112601 DPA10103-DPB11501 DPA10103-DPB11601 DPA10103-DPB11801 DPA10103-DPB11901 DPA10103-DPB12301 DPA10103-DPB13101 DPA10103-DPB13401 DPA10103-DPB13901 DPA10103-DPB14001 DPA10103-DPB14101 DPA10103-DPB14801 DPA10103-DPB14901 DPA10103-DPB15001 DPA10103-DPB15101 DPA10103-DPB15501 DPA10103-DPB15901 DPA10103-DPB18001 DPA10104-DPB10101 DPA10104-DPB11501 DPA10105-DPB10101 DPA10105-DPB10401 DPA10105-DPB11801 DPA10105-DPB15001 DPA10106-DPB10101 DPA10201-DPB10101 DPA10201-DPB10201 DPA10201-DPB10202 DPA10201-DPB10401 DPA10201-DPB10501 DPA10201-DPB110601 DPA10201-DPB11501 DPA10201-DPB11601 DPA10201-DPB11901 DPA10201-DPB13401 DPA10201-DPB15501 DPA10202-DPB10101 DPA10202-DPB10201 DPA10202-DPB10202 DPA10202-DPB10401 DPA10202-DPB10501 DPA10202-DPB110601 DPA10202-DPB11101 DPA10202-DPB11301 DPA10202-DPB11801 DPA10202-DPB11901; note = HLAs: DPA10202-DPB13101 DPA10202-DPB13801 DPA10202-DPB15501 DPA10202-DPB16501 DPA10301-DPB10101 DPA10301-DPB10201 DPA10301-DPB10202 DPA10301-DPB10401 DPA10301-DPB10402 DPA10301-DPB110501 DPA10301-DPB110601 DPA10301-DPB11101 DPA10301-DPB11301 DPA10301-DPB11801 DPA10301-DPB12301 DPA10301-DPB13901 DPA10301-DPB14001 DPA10301-DPB14901 DPA10301-DPB15501 DPA10301-DPB16501 DPA10301-DPB17501 DPA10301-DPB18001 DPA10401-DPB10101 DPA10401-DPB10201 DPA10401-DPB10202 DPA10401-DPB10402 DPA10401-DPB10501 DPA10401-DPB110501 DPA10401-DPB14901
KEPPFLWMGFELNPDKWTVQ

SEQ ID NO: 6686 - protein, 14 aa, synthetic construct
  source 1..14: note = Seed: PPFLWMGYELHPDK; note = HLAs: DPA10103-DPB10101 DPA10103-DPB10201 DPA10103-DPB10202 DPA10103-DPB10401 DPA10103-DPB112601 DPA10103-DPB11501 DPA10103-DPB11601 DPA10103-DPB11901 DPA10103-DPB12301 DPA10103-DPB13101 DPA10103-DPB13401 DPA10103-DPB13901 DPA10103-DPB14001 DPA10103-DPB14101 DPA10103-DPB14801 DPA10103-DPB15001 DPA10103-DPB15901 DPA10104-DPB10101 DPA10104-DPB11501 DPA10105-DPB10101 DPA10105-DPB10401 DPA10105-DPB15001 DPA10106-DPB10101 DPA10201-DPB10101 DPA10201-DPB110601 DPA10201-DPB11501 DPA10201-DPB11601 DPA10201-DPB11901 DPA10202-DPB10101 DPA10202-DPB10201 DPA10202-DPB10202 DPA10202-DPB10401 DPA10202-DPB110601 DPA10202-DPB11901 DPA10202-DPB13101 DPA10202-DPB16501 DPA10301-DPB10101 DPA10301-DPB10201 DPA10301-DPB10202 DPA10301-DPB10401 DPA10301-DPB10402 DPA10301-DPB110501 DPA10301-DPB110601 DPA10301-DPB11801 DPA10301-DPB12301 DPA10301-DPB13901 DPA10301-DPB14001 DPA10301-DPB14901 DPA10301-DPB15501 DPA10301-DPB16501 DPA10301-DPB17501 DPA10301-DPB18001 DPA10401-DPB10101 DPA10401-DPB10201; note = HLAs: DPA10401-DPB10202 DPA10401-DPB10402 DPA10401-DPB10501 DPA10401-DPB110501 DPA10401-DPB14901
PPILWAGFELFPDK

SEQ ID NO: 6687 - protein, 14 aa, synthetic construct
  source 1..14: note = Seed: PPFLWMGYELHPDK; note = HLAs: DPA10103-DPB10101 DPA10103-DPB10201 DPA10103-DPB10202 DPA10103-DPB10401 DPA10103-DPB112601 DPA10103-DPB11501 DPA10103-DPB11601 DPA10103-DPB11901 DPA10103-DPB12301 DPA10103-DPB13101 DPA10103-DPB13401 DPA10103-DPB13901 DPA10103-DPB14001 DPA10103-DPB14101 DPA10103-DPB14801 DPA10103-DPB15001 DPA10103-DPB15901 DPA10104-DPB10101 DPA10104-DPB11501 DPA10105-DPB10101 DPA10105-DPB10401 DPA10105-DPB15001 DPA10106-DPB10101 DPA10201-DPB10101 DPA10201-DPB110601 DPA10201-DPB11501 DPA10201-DPB11601 DPA10201-DPB11901 DPA10202-DPB10101 DPA10202-DPB10201 DPA10202-DPB10202 DPA10202-DPB10401 DPA10202-DPB110601 DPA10202-DPB11901 DPA10202-DPB13101 DPA10202-DPB16501 DPA10301-DPB10101 DPA10301-DPB10201 DPA10301-DPB10202 DPA10301-DPB10401 DPA10301-DPB10402 DPA10301-DPB110501 DPA10301-DPB110601 DPA10301-DPB11801 DPA10301-DPB12301 DPA10301-DPB13901 DPA10301-DPB14001 DPA10301-DPB14901 DPA10301-DPB15501 DPA10301-DPB16501 DPA10301-DPB17501 DPA10301-DPB18001 DPA10401-DPB10101 DPA10401-DPB10201; note = HLAs: DPA10401-DPB10202 DPA10401-DPB10402 DPA10401-DPB10501 DPA10401-DPB110501 DPA10401-DPB14901
PPFLWVGFELRPDK

SEQ ID NO: 6688 - protein, 14 aa, synthetic construct
  source 1..14: note = Seed: PPFLWMGYELHPDK; note = HLAs: DPA10103-DPB10101 DPA10103-DPB10201 DPA10103-DPB10202 DPA10103-DPB10401 DPA10103-DPB112601 DPA10103-DPB11501 DPA10103-DPB11601 DPA10103-DPB11901 DPA10103-DPB12301 DPA10103-DPB13101 DPA10103-DPB13401 DPA10103-DPB13901 DPA10103-DPB14001 DPA10103-DPB14101 DPA10103-DPB14801 DPA10103-DPB15001 DPA10103-DPB15901 DPA10104-DPB10101 DPA10104-DPB11501 DPA10105-DPB10101 DPA10105-DPB10401 DPA10105-DPB15001 DPA10106-DPB10101 DPA10201-DPB10101 DPA10201-DPB110601 DPA10201-DPB11501 DPA10201-DPB11601 DPA10201-DPB11901 DPA10202-DPB10101 DPA10202-DPB10201 DPA10202-DPB10202 DPA10202-DPB10401 DPA10202-DPB110601 DPA10202-DPB11901 DPA10202-DPB13101 DPA10202-DPB16501 DPA10301-DPB10101 DPA10301-DPB10201 DPA10301-DPB10202 DPA10301-DPB10401 DPA10301-DPB10402 DPA10301-DPB110501 DPA10301-DPB110601 DPA10301-DPB11801 DPA10301-DPB12301 DPA10301-DPB13901 DPA10301-DPB14001 DPA10301-DPB14901 DPA10301-DPB15501 DPA10301-DPB16501 DPA10301-DPB17501 DPA10301-DPB18001 DPA10401-DPB10101 DPA10401-DPB10201; note = HLAs: DPA10401-DPB10202 DPA10401-DPB10402 DPA10401-DPB10501 DPA10401-DPB110501 DPA10401-DPB14901
PPLLWAGFELAPDK

SEQ ID NO: 6689 - protein, 20 aa, synthetic construct
  source 1..20: note = Seed: KEPPFLWMGYELHPDKWTVQ; note = HLAs: DPA10103-DPB10101 DPA10103-DPB10201 DPA10103-DPB10202 DPA10103-DPB10401 DPA10103-DPB10402 DPA10103-DPB10501 DPA10103-DPB110501 DPA10103-DPB112601 DPA10103-DPB11501 DPA10103-DPB11601 DPA10103-DPB11801 DPA10103-DPB11901 DPA10103-DPB12301 DPA10103-DPB13101 DPA10103-DPB13401 DPA10103-DPB13901 DPA10103-DPB14001 DPA10103-DPB14101 DPA10103-DPB14801 DPA10103-DPB14901 DPA10103-DPB15001 DPA10103-DPB15101 DPA10103-DPB15501 DPA10103-DPB15901 DPA10103-DPB18001 DPA10104-DPB10101 DPA10104-DPB11501 DPA10105-DPB10101 DPA10105-DPB10401 DPA10105-DPB11801 DPA10105-DPB15001 DPA10106-DPB10101 DPA10201-DPB10101 DPA10201-DPB10201 DPA10201-DPB10202 DPA10201-DPB10401 DPA10201-DPB10501 DPA10201-DPB110601 DPA10201-DPB11501 DPA10201-DPB11601 DPA10201-DPB11901 DPA10201-DPB13401 DPA10201-DPB15501 DPA10202-DPB10101 DPA10202-DPB10201 DPA10202-DPB10202 DPA10202-DPB10401 DPA10202-DPB10501 DPA10202-DPB110601 DPA10202-DPB11101 DPA10202-DPB11301 DPA10202-DPB11801 DPA10202-DPB11901 DPA10202-DPB13101 DPA10202-DPB13801; note = HLAs: DPA10202-DPB15501 DPA10202-DPB16501 DPA10301-DPB10101 DPA10301-DPB10201 DPA10301-DPB10202 DPA10301-DPB10401 DPA10301-DPB10402 DPA10301-DPB110501 DPA10301-DPB110601 DPA10301-DPB11801 DPA10301-DPB12301 DPA10301-DPB13901 DPA10301-DPB14001 DPA10301-DPB14901 DPA10301-DPB16501 DPA10301-DPB17501 DPA10301-DPB18001 DPA10401-DPB10101 DPA10401-DPB10201 DPA10401-DPB10202 DPA10401-DPB10402 DPA10401-DPB10501 DPA10401-DPB110501 DPA10401-DPB14901
KEPPFLWRGFELFPDKWTVQ

SEQ ID NO: 6690 - protein, 14 aa, synthetic construct
  source 1..14: note = Seed: PPFLWMGYELHPDK; note = HLAs: DPA10103-DPB10101 DPA10103-DPB10201 DPA10103-DPB10202 DPA10103-DPB10401 DPA10103-DPB112601 DPA10103-DPB11501 DPA10103-DPB11601 DPA10103-DPB11901 DPA10103-DPB12301 DPA10103-DPB13101 DPA10103-DPB13401 DPA10103-DPB13901 DPA10103-DPB14001 DPA10103-DPB14101 DPA10103-DPB14801 DPA10103-DPB15001 DPA10103-DPB15901 DPA10104-DPB10101 DPA10104-DPB11501 DPA10105-DPB10101 DPA10105-DPB10401 DPA10105-DPB15001 DPA10106-DPB10101 DPA10201-DPB10101 DPA10201-DPB110601 DPA10201-DPB11501 DPA10201-DPB11601 DPA10201-DPB11901 DPA10202-DPB10101 DPA10202-DPB10201 DPA10202-DPB10202 DPA10202-DPB10401 DPA10202-DPB110601 DPA10202-DPB11901 DPA10202-DPB13101 DPA10202-DPB16501 DPA10301-DPB10101 DPA10301-DPB10201 DPA10301-DPB10202 DPA10301-DPB10401 DPA10301-DPB10402 DPA10301-DPB110501 DPA10301-DPB110601 DPA10301-DPB11801 DPA10301-DPB12301 DPA10301-DPB13901 DPA10301-DPB14001 DPA10301-DPB14901 DPA10301-DPB15501 DPA10301-DPB16501 DPA10301-DPB17501 DPA10301-DPB18001 DPA10401-DPB10101 DPA10401-DPB10201; note = HLAs: DPA10401-DPB10202 DPA10401-DPB10402 DPA10401-DPB10501 DPA10401-DPB110501 DPA10401-DPB14901
PPFLWDGFELFPDK

SEQ ID NO: 6691 - protein, 20 aa, synthetic construct
  source 1..20: note = Seed: KEPPFLWMGYELHPDKWTVQ; note = HLAs: DRB1_0101 DPA10103-DPB10101 DPA10103-DPB10201 DPA10103-DPB10202 DPA10103-DPB10401 DPA10103-DPB10402 DPA10103-DPB10501 DPA10103-DPB110501 DPA10103-DPB112601 DPA10103-DPB11501 DPA10103-DPB11601 DPA10103-DPB11801 DPA10103-DPB11901 DPA10103-DPB12301 DPA10103-DPB13101 DPA10103-DPB13401 DPA10103-DPB13901 DPA10103-DPB14001 DPA10103-DPB14101 DPA10103-DPB14801 DPA10103-DPB14901 DPA10103-DPB15001 DPA10103-DPB15101 DPA10103-DPB15501 DPA10103-DPB15901 DPA10103-DPB18001 DPA10104-DPB10101 DPA10104-DPB11501 DPA10105-DPB10101 DPA10105-DPB10401 DPA10105-DPB11801 DPA10105-DPB15001 DPA10106-DPB10101 DPA10201-DPB10101 DPA10201-DPB10201 DPA10201-DPB10202 DPA10201-DPB10401 DPA10201-DPB10501 DPA10201-DPB110601 DPA10201-DPB11501 DPA10201-DPB11601 DPA10201-DPB11901 DPA10201-DPB13401 DPA10201-DPB15501 DPA10202-DPB10101 DPA10202-DPB10201 DPA10202-DPB10202 DPA10202-DPB10401 DPA10202-DPB10501 DPA10202-DPB110601 DPA10202-DPB11101 DPA10202-DPB11301 DPA10202-DPB11801 DPA10202-DPB11901 DPA10202-DPB13101; note = HLAs: DPA10202-DPB13801 DPA10202-DPB15501 DPA10202-DPB16501 DPA10301-DPB10101 DPA10301-DPB10201 DPA10301-DPB10202 DPA10301-DPB10401 DPA10301-DPB10402 DPA10301-DPB110501 DPA10301-DPB110601 DPA10301-DPB11101 DPA10301-DPB11301 DPA10301-DPB11801 DPA10301-DPB12301 DPA10301-DPB13901 DPA10301-DPB14001 DPA10301-DPB14901 DPA10301-DPB15501 DPA10301-DPB16501 DPA10301-DPB17501 DPA10301-DPB18001 DPA10401-DPB10101 DPA10401-DPB10201 DPA10401-DPB10202 DPA10401-DPB10402 DPA10401-DPB10501 DPA10401-DPB110501 DPA10401-DPB14901
KEPPYLWKGFELVPDKWTVQ

SEQ ID NO: 6692 - protein, 14 aa, synthetic construct
  source 1..14: note = Seed: PPFLWMGYELHPDK; note = HLAs: DPA10103-DPB10101 DPA10103-DPB10201 DPA10103-DPB10202 DPA10103-DPB10401 DPA10103-DPB112601 DPA10103-DPB11501 DPA10103-DPB11601 DPA10103-DPB11901 DPA10103-DPB12301 DPA10103-DPB13101 DPA10103-DPB13401 DPA10103-DPB13901 DPA10103-DPB14001 DPA10103-DPB14101 DPA10103-DPB14801 DPA10103-DPB15001 DPA10103-DPB15901 DPA10104-DPB10101 DPA10104-DPB11501 DPA10105-DPB10101 DPA10105-DPB10401 DPA10105-DPB15001 DPA10106-DPB10101 DPA10201-DPB10101 DPA10201-DPB110601 DPA10201-DPB11501 DPA10201-DPB11601 DPA10201-DPB11901 DPA10202-DPB10101 DPA10202-DPB10201 DPA10202-DPB10202 DPA10202-DPB10401 DPA10202-DPB110601 DPA10202-DPB11901 DPA10202-DPB13101 DPA10202-DPB16501 DPA10301-DPB10101 DPA10301-DPB10201 DPA10301-DPB10202 DPA10301-DPB10401 DPA10301-DPB10402 DPA10301-DPB110501 DPA10301-DPB110601 DPA10301-DPB11801 DPA10301-DPB12301 DPA10301-DPB13901 DPA10301-DPB14001 DPA10301-DPB14901 DPA10301-DPB16501 DPA10301-DPB17501 DPA10301-DPB18001 DPA10401-DPB10101 DPA10401-DPB10201 DPA10401-DPB10202; note = HLAs: DPA10401-DPB10402 DPA10401-DPB10501 DPA10401-DPB110501 DPA10401-DPB14901
PPLLWVGFELAPDK

SEQ ID NO: 6693 - protein, 20 aa, synthetic construct
  source 1..20: note = Seed: KEPPFLWMGYELHPDKWTVQ; note = HLAs: DRB1_0101 DRB1_1001 DPA10103-DPB10101 DPA10103-DPB10201 DPA10103-DPB10202 DPA10103-DPB10401 DPA10103-DPB10402 DPA10103-DPB10501 DPA10103-DPB110501 DPA10103-DPB112601 DPA10103-DPB11501 DPA10103-DPB11601 DPA10103-DPB11801 DPA10103-DPB11901 DPA10103-DPB12301 DPA10103-DPB13101 DPA10103-DPB13401 DPA10103-DPB13901 DPA10103-DPB14001 DPA10103-DPB14101 DPA10103-DPB14801 DPA10103-DPB14901 DPA10103-DPB15001 DPA10103-DPB15101 DPA10103-DPB15501 DPA10103-DPB15901 DPA10103-DPB18001 DPA10104-DPB10101 DPA10104-DPB11501 DPA10105-DPB10101 DPA10105-DPB10401 DPA10105-DPB11801 DPA10105-DPB15001 DPA10106-DPB10101 DPA10201-DPB10101 DPA10201-DPB10201 DPA10201-DPB10202 DPA10201-DPB10401 DPA10201-DPB10501 DPA10201-DPB110601 DPA10201-DPB11501 DPA10201-DPB11601 DPA10201-DPB11901 DPA10201-DPB13401 DPA10201-DPB15501 DPA10202-DPB10101 DPA10202-DPB10201 DPA10202-DPB10202 DPA10202-DPB10401 DPA10202-DPB10501 DPA10202-DPB110601 DPA10202-DPB11101 DPA10202-DPB11301 DPA10202-DPB11801 DPA10202-DPB11901; note = HLAs: DPA10202-DPB13101 DPA10202-DPB13801 DPA10202-DPB15501 DPA10202-DPB16501 DPA10301-DPB10101 DPA10301-DPB10201 DPA10301-DPB10202 DPA10301-DPB10401 DPA10301-DPB10402 DPA10301-DPB110501 DPA10301-DPB110601 DPA10301-DPB11101 DPA10301-DPB11301 DPA10301-DPB11801 DPA10301-DPB12301 DPA10301-DPB13901 DPA10301-DPB14001 DPA10301-DPB14901 DPA10301-DPB15501 DPA10301-DPB16501 DPA10301-DPB17501 DPA10301-DPB18001 DPA10401-DPB10101 DPA10401-DPB10201 DPA10401-DPB10202 DPA10401-DPB10402 DPA10401-DPB10501 DPA10401-DPB110501 DPA10401-DPB14901
KEPPFLWMGFELTPDKWTVQ

SEQ ID NO: 6694 - protein, 20 aa, synthetic construct
  source 1..20: note = Seed: KEPPFLWMGYELHPDKWTVQ; note = HLAs: DPA10103-DPB10101 DPA10103-DPB10201 DPA10103-DPB10202 DPA10103-DPB10401 DPA10103-DPB10402 DPA10103-DPB10501 DPA10103-DPB110501 DPA10103-DPB112601 DPA10103-DPB11501 DPA10103-DPB11601 DPA10103-DPB11801 DPA10103-DPB11901 DPA10103-DPB12301 DPA10103-DPB13101 DPA10103-DPB13401 DPA10103-DPB13901 DPA10103-DPB14001 DPA10103-DPB14101 DPA10103-DPB14801 DPA10103-DPB14901 DPA10103-DPB15001 DPA10103-DPB15101 DPA10103-DPB15501 DPA10103-DPB15901 DPA10103-DPB18001 DPA10104-DPB10101 DPA10104-DPB11501 DPA10105-DPB10101 DPA10105-DPB10401 DPA10105-DPB11801 DPA10105-DPB15001 DPA10106-DPB10101 DPA10201-DPB10101 DPA10201-DPB10201 DPA10201-DPB10202 DPA10201-DPB10401 DPA10201-DPB10501 DPA10201-DPB110601 DPA10201-DPB11501 DPA10201-DPB11601 DPA10201-DPB11901 DPA10201-DPB13401 DPA10201-DPB15501 DPA10202-DPB10101 DPA10202-DPB10201 DPA10202-DPB10202 DPA10202-DPB10401 DPA10202-DPB10501 DPA10202-DPB110601 DPA10202-DPB11101 DPA10202-DPB11301 DPA10202-DPB11801 DPA10202-DPB11901 DPA10202-DPB13101 DPA10202-DPB13801; note = HLAs: DPA10202-DPB15501 DPA10202-DPB16501 DPA10301-DPB10101 DPA10301-DPB10201 DPA10301-DPB10202 DPA10301-DPB10401 DPA10301-DPB10402 DPA10301-DPB110501 DPA10301-DPB110601 DPA10301-DPB11101 DPA10301-DPB11301 DPA10301-DPB11801 DPA10301-DPB12301 DPA10301-DPB13901 DPA10301-DPB14001 DPA10301-DPB14901 DPA10301-DPB15501 DPA10301-DPB16501 DPA10301-DPB17501 DPA10301-DPB18001 DPA10401-DPB10101 DPA10401-DPB10201 DPA10401-DPB10202 DPA10401-DPB10402 DPA10401-DPB10501 DPA10401-DPB110501 DPA10401-DPB14901
KEPPYLWKGFELIPDKWTVQ

SEQ ID NO: 6695 - protein, 20 aa, synthetic construct
  source 1..20: note = Seed: KEPPFLWMGYELHPDKWTVQ; note = HLAs: DRB1_0101 DPA10103-DPB10101 DPA10103-DPB10201 DPA10103-DPB10202 DPA10103-DPB10401 DPA10103-DPB10402 DPA10103-DPB10501 DPA10103-DPB110501 DPA10103-DPB112601 DPA10103-DPB11501 DPA10103-DPB11601 DPA10103-DPB11801 DPA10103-DPB11901 DPA10103-DPB12301 DPA10103-DPB13101 DPA10103-DPB13401 DPA10103-DPB13901 DPA10103-DPB14001 DPA10103-DPB14101 DPA10103-DPB14801 DPA10103-DPB14901 DPA10103-DPB15001 DPA10103-DPB15101 DPA10103-DPB15501 DPA10103-DPB15901 DPA10103-DPB18001 DPA10104-DPB10101 DPA10104-DPB11501 DPA10105-DPB10101 DPA10105-DPB10401 DPA10105-DPB11801 DPA10105-DPB15001 DPA10106-DPB10101 DPA10201-DPB10101 DPA10201-DPB10201 DPA10201-DPB10202 DPA10201-DPB10401 DPA10201-DPB10501 DPA10201-DPB110601 DPA10201-DPB11501 DPA10201-DPB11601 DPA10201-DPB11901 DPA10201-DPB13401 DPA10201-DPB15501 DPA10202-DPB10101 DPA10202-DPB10201 DPA10202-DPB10202 DPA10202-DPB10401 DPA10202-DPB10501 DPA10202-DPB110601 DPA10202-DPB11101 DPA10202-DPB11301 DPA10202-DPB11801 DPA10202-DPB11901 DPA10202-DPB13101; note = HLAs: DPA10202-DPB13801 DPA10202-DPB15501 DPA10202-DPB16501 DPA10301-DPB10101 DPA10301-DPB10201 DPA10301-DPB10202 DPA10301-DPB10401 DPA10301-DPB10402 DPA10301-DPB110501 DPA10301-DPB110601 DPA10301-DPB11301 DPA10301-DPB11801 DPA10301-DPB12301 DPA10301-DPB13901 DPA10301-DPB14001 DPA10301-DPB14901 DPA10301-DPB15501 DPA10301-DPB16501 DPA10301-DPB17501 DPA10301-DPB18001 DPA10401-DPB10101 DPA10401-DPB10201 DPA10401-DPB10202 DPA10401-DPB10402 DPA10401-DPB10501 DPA10401-DPB110501 DPA10401-DPB14901
KEPPLLWAGFELAPDKWTVQ

SEQ ID NO: 6696 - protein, 14 aa, synthetic construct
  source 1..14: note = Seed: PPFLWMGYELHPDK; note = HLAs: DPA10103-DPB10101 DPA10103-DPB10201 DPA10103-DPB10202 DPA10103-DPB10401 DPA10103-DPB112601 DPA10103-DPB11501 DPA10103-DPB11601 DPA10103-DPB11901 DPA10103-DPB12301 DPA10103-DPB13401 DPA10103-DPB13901 DPA10103-DPB14001 DPA10103-DPB14101 DPA10103-DPB14801 DPA10103-DPB15001 DPA10103-DPB15901 DPA10104-DPB10101 DPA10104-DPB11501 DPA10105-DPB10101 DPA10105-DPB10401 DPA10105-DPB15001 DPA10106-DPB10101 DPA10201-DPB10101 DPA10201-DPB110601 DPA10201-DPB11501 DPA10201-DPB11601 DPA10201-DPB11901 DPA10202-DPB10101 DPA10202-DPB10201 DPA10202-DPB10202 DPA10202-DPB10401 DPA10202-DPB110601 DPA10202-DPB11901 DPA10202-DPB13101 DPA10202-DPB16501 DPA10301-DPB10101 DPA10301-DPB10201 DPA10301-DPB10202 DPA10301-DPB10401 DPA10301-DPB10402 DPA10301-DPB110501 DPA10301-DPB110601 DPA10301-DPB11801 DPA10301-DPB12301 DPA10301-DPB13901 DPA10301-DPB14001 DPA10301-DPB14901 DPA10301-DPB15501 DPA10301-DPB16501 DPA10301-DPB17501 DPA10301-DPB18001 DPA10401-DPB10201 DPA10401-DPB10202 DPA10401-DPB10402; note = HLAs: DPA10401-DPB10501 DPA10401-DPB110501 DPA10401-DPB14901
PPFLWFGLELLPDK

SEQ ID NO: 6697 - protein, 20 aa, synthetic construct
  source 1..20: note = Seed: KEPPFLWMGYELHPDKWTVQ; note = HLAs: DPA10103-DPB10101 DPA10103-DPB10201 DPA10103-DPB10202 DPA10103-DPB10401 DPA10103-DPB10402 DPA10103-DPB10501 DPA10103-DPB110501 DPA10103-DPB112601 DPA10103-DPB11501 DPA10103-DPB11601 DPA10103-DPB11801 DPA10103-DPB11901 DPA10103-DPB12301 DPA10103-DPB13101 DPA10103-DPB13401 DPA10103-DPB13901 DPA10103-DPB14001 DPA10103-DPB14101 DPA10103-DPB14801 DPA10103-DPB14901 DPA10103-DPB15001 DPA10103-DPB15101 DPA10103-DPB15501 DPA10103-DPB15901 DPA10103-DPB18001 DPA10104-DPB10101 DPA10104-DPB11501 DPA10105-DPB10101 DPA10105-DPB10401 DPA10105-DPB11801 DPA10105-DPB15001 DPA10106-DPB10101 DPA10201-DPB10101 DPA10201-DPB10201 DPA10201-DPB10202 DPA10201-DPB10401 DPA10201-DPB10501 DPA10201-DPB110601 DPA10201-DPB11501 DPA10201-DPB11601 DPA10201-DPB11901 DPA10201-DPB13401 DPA10201-DPB15501 DPA10202-DPB10101 DPA10202-DPB10201 DPA10202-DPB10202 DPA10202-DPB10401 DPA10202-DPB10501 DPA10202-DPB110601 DPA10202-DPB11101 DPA10202-DPB11301 DPA10202-DPB11801 DPA10202-DPB11901 DPA10202-DPB13101 DPA10202-DPB13801; note = HLAs: DPA10202-DPB15501 DPA10202-DPB16501 DPA10301-DPB10101 DPA10301-DPB10201 DPA10301-DPB10202 DPA10301-DPB10401 DPA10301-DPB10402 DPA10301-DPB110501 DPA10301-DPB110601 DPA10301-DPB11101 DPA10301-DPB11301 DPA10301-DPB11801 DPA10301-DPB12301 DPA10301-DPB13901 DPA10301-DPB14001 DPA10301-DPB14901 DPA10301-DPB15501 DPA10301-DPB16501 DPA10301-DPB17501 DPA10301-DPB18001 DPA10401-DPB10101 DPA10401-DPB10201 DPA10401-DPB10202 DPA10401-DPB10402 DPA10401-DPB10501 DPA10401-DPB110501 DPA10401-DPB14901
KEPPILWTGFELYPDKWTVQ

SEQ ID NO: 6698 - protein, 20 aa, synthetic construct
  source 1..20: note = Seed: KEPPFLWMGYELHPDKWTVQ; note = HLAs: DRB1_0101 DRB1_1001 DPA10103-DPB10101 DPA10103-DPB10201 DPA10103-DPB10202 DPA10103-DPB10401 DPA10103-DPB10402 DPA10103-DPB10501 DPA10103-DPB110501 DPA10103-DPB112601 DPA10103-DPB11501 DPA10103-DPB11601 DPA10103-DPB11801 DPA10103-DPB11901 DPA10103-DPB12301 DPA10103-DPB13101 DPA10103-DPB13401 DPA10103-DPB13901 DPA10103-DPB14001 DPA10103-DPB14101 DPA10103-DPB14801 DPA10103-DPB14901 DPA10103-DPB15001 DPA10103-DPB15101 DPA10103-DPB15501 DPA10103-DPB15901 DPA10103-DPB18001 DPA10104-DPB10101 DPA10104-DPB11501 DPA10105-DPB10101 DPA10105-DPB10401 DPA10105-DPB11801 DPA10105-DPB15001 DPA10106-DPB10101 DPA10201-DPB10101 DPA10201-DPB10201 DPA10201-DPB10202 DPA10201-DPB10401 DPA10201-DPB10501 DPA10201-DPB110601 DPA10201-DPB11501 DPA10201-DPB11601 DPA10201-DPB11901 DPA10201-DPB13401 DPA10201-DPB15501 DPA10202-DPB10101 DPA10202-DPB10201 DPA10202-DPB10202 DPA10202-DPB10401 DPA10202-DPB10501 DPA10202-DPB110601 DPA10202-DPB11101 DPA10202-DPB11301 DPA10202-DPB11801 DPA10202-DPB11901; note = HLAs: DPA10202-DPB13101 DPA10202-DPB13801 DPA10202-DPB15501 DPA10202-DPB16501 DPA10301-DPB10101 DPA10301-DPB10201 DPA10301-DPB10202 DPA10301-DPB10401 DPA10301-DPB10402 DPA10301-DPB110501 DPA10301-DPB110601 DPA10301-DPB11101 DPA10301-DPB11301 DPA10301-DPB11801 DPA10301-DPB12301 DPA10301-DPB13901 DPA10301-DPB14001 DPA10301-DPB14901 DPA10301-DPB15501 DPA10301-DPB16501 DPA10301-DPB17501 DPA10301-DPB18001 DPA10401-DPB10101 DPA10401-DPB10201 DPA10401-DPB10202 DPA10401-DPB10402 DPA10401-DPB10501 DPA10401-DPB110501 DPA10401-DPB14901
KEPPFLWIGWELLPDKWTVQ

SEQ ID NO: 6699 - protein, 20 aa, synthetic construct
  source 1..20: note = Seed: KEPPFLWMGYELHPDKWTVQ; note = HLAs: DPA10103-DPB10101 DPA10103-DPB10201 DPA10103-DPB10202 DPA10103-DPB10401 DPA10103-DPB10402 DPA10103-DPB10501 DPA10103-DPB110501 DPA10103-DPB112601 DPA10103-DPB11501 DPA10103-DPB11601 DPA10103-DPB11801 DPA10103-DPB11901 DPA10103-DPB12301 DPA10103-DPB13101 DPA10103-DPB13401 DPA10103-DPB13901 DPA10103-DPB14001 DPA10103-DPB14101 DPA10103-DPB14801 DPA10103-DPB14901 DPA10103-DPB15001 DPA10103-DPB15101 DPA10103-DPB15501 DPA10103-DPB15901 DPA10103-DPB18001 DPA10104-DPB10101 DPA10104-DPB11501 DPA10105-DPB10101 DPA10105-DPB10401 DPA10105-DPB11801 DPA10105-DPB15001 DPA10106-DPB10101 DPA10201-DPB10101 DPA10201-DPB10201 DPA10201-DPB10202 DPA10201-DPB10401 DPA10201-DPB10501 DPA10201-DPB110601 DPA10201-DPB11501 DPA10201-DPB11601 DPA10201-DPB11901 DPA10201-DPB13401 DPA10201-DPB15501 DPA10202-DPB10101 DPA10202-DPB10201 DPA10202-DPB10202 DPA10202-DPB10401 DPA10202-DPB10501 DPA10202-DPB110601 DPA10202-DPB11101 DPA10202-DPB11301 DPA10202-DPB11801 DPA10202-DPB11901 DPA10202-DPB13101 DPA10202-DPB13801; note = HLAs: DPA10202-DPB15501 DPA10202-DPB16501 DPA10301-DPB10101 DPA10301-DPB10201 DPA10301-DPB10202 DPA10301-DPB10401 DPA10301-DPB10402 DPA10301-DPB110501 DPA10301-DPB110601 DPA10301-DPB11801 DPA10301-DPB12301 DPA10301-DPB13901 DPA10301-DPB14001 DPA10301-DPB14901 DPA10301-DPB16501 DPA10301-DPB17501 DPA10301-DPB18001 DPA10401-DPB10101 DPA10401-DPB10201 DPA10401-DPB10202 DPA10401-DPB10402 DPA10401-DPB10501 DPA10401-DPB110501 DPA10401-DPB14901
KEPPFLWRGFELMPDKWTVQ

SEQ ID NO: 6700 - protein, 14 aa, synthetic construct
  source 1..14: note = Seed: PPFLWMGYELHPDK; note = HLAs: DPA10103-DPB10101 DPA10103-DPB10201 DPA10103-DPB10202 DPA10103-DPB10401 DPA10103-DPB112601 DPA10103-DPB11501 DPA10103-DPB11601 DPA10103-DPB11901 DPA10103-DPB12301 DPA10103-DPB13101 DPA10103-DPB13401 DPA10103-DPB13901 DPA10103-DPB14001 DPA10103-DPB14101 DPA10103-DPB14801 DPA10103-DPB15001 DPA10103-DPB15901 DPA10104-DPB10101 DPA10104-DPB11501 DPA10105-DPB10101 DPA10105-DPB10401 DPA10105-DPB15001 DPA10106-DPB10101 DPA10201-DPB10101 DPA10201-DPB110601 DPA10201-DPB11501 DPA10201-DPB11601 DPA10201-DPB11901 DPA10202-DPB10101 DPA10202-DPB10201 DPA10202-DPB10202 DPA10202-DPB10401 DPA10202-DPB110601 DPA10202-DPB11901 DPA10202-DPB13101 DPA10202-DPB16501 DPA10301-DPB10101 DPA10301-DPB10201 DPA10301-DPB10202 DPA10301-DPB10401 DPA10301-DPB10402 DPA10301-DPB110501 DPA10301-DPB110601 DPA10301-DPB11801 DPA10301-DPB12301 DPA10301-DPB13901 DPA10301-DPB14001 DPA10301-DPB14901 DPA10301-DPB15501 DPA10301-DPB16501 DPA10301-DPB17501 DPA10301-DPB18001 DPA10401-DPB10101 DPA10401-DPB10201; note = HLAs: DPA10401-DPB10202 DPA10401-DPB10402 DPA10401-DPB10501 DPA10401-DPB110501 DPA10401-DPB14901
PPFLWIGFELRPDK

SEQ ID NO: 6701 - protein, 20 aa, synthetic construct
  source 1..20: note = Seed: KEPPFLWMGYELHPDKWTVQ; note = HLAs: DPA10103-DPB10101 DPA10103-DPB10201 DPA10103-DPB10202 DPA10103-DPB10401 DPA10103-DPB10402 DPA10103-DPB10501 DPA10103-DPB110501 DPA10103-DPB112601 DPA10103-DPB11501 DPA10103-DPB11601 DPA10103-DPB11801 DPA10103-DPB11901 DPA10103-DPB12301 DPA10103-DPB13101 DPA10103-DPB13401 DPA10103-DPB13901 DPA10103-DPB14001 DPA10103-DPB14101 DPA10103-DPB14801 DPA10103-DPB14901 DPA10103-DPB15001 DPA10103-DPB15101 DPA10103-DPB15501 DPA10103-DPB15901 DPA10103-DPB18001 DPA10104-DPB10101 DPA10104-DPB11501 DPA10105-DPB10101 DPA10105-DPB10401 DPA10105-DPB11801 DPA10105-DPB15001 DPA10106-DPB10101 DPA10201-DPB10101 DPA10201-DPB10201 DPA10201-DPB10202 DPA10201-DPB10401 DPA10201-DPB10501 DPA10201-DPB110601 DPA10201-DPB11501 DPA10201-DPB11601 DPA10201-DPB11901 DPA10201-DPB13401 DPA10201-DPB15501 DPA10202-DPB10101 DPA10202-DPB10201 DPA10202-DPB10202 DPA10202-DPB10401 DPA10202-DPB10501 DPA10202-DPB110601 DPA10202-DPB11101 DPA10202-DPB11301 DPA10202-DPB11801 DPA10202-DPB11901 DPA10202-DPB13101 DPA10202-DPB13801; note = HLAs: DPA10202-DPB15501 DPA10202-DPB16501 DPA10301-DPB10101 DPA10301-DPB10201 DPA10301-DPB10202 DPA10301-DPB10401 DPA10301-DPB10402 DPA10301-DPB110501 DPA10301-DPB110601 DPA10301-DPB11301 DPA10301-DPB11801 DPA10301-DPB12301 DPA10301-DPB13901 DPA10301-DPB14001 DPA10301-DPB14901 DPA10301-DPB16501 DPA10301-DPB17501 DPA10301-DPB18001 DPA10401-DPB10101 DPA10401-DPB10201 DPA10401-DPB10202 DPA10401-DPB10402 DPA10401-DPB10501 DPA10401-DPB110501 DPA10401-DPB14901
KEPPVLWHGFELLPDKWTVQ

SEQ ID NO: 6702 - protein, 20 aa, synthetic construct
  source 1..20: note = Seed: KEPPFLWMGYELHPDKWTVQ; note = HLAs: DPA10103-DPB10101 DPA10103-DPB10201 DPA10103-DPB10202 DPA10103-DPB10401 DPA10103-DPB10402 DPA10103-DPB10501 DPA10103-DPB110501 DPA10103-DPB112601 DPA10103-DPB11501 DPA10103-DPB11601 DPA10103-DPB11801 DPA10103-DPB11901 DPA10103-DPB12301 DPA10103-DPB13101 DPA10103-DPB13401 DPA10103-DPB13901 DPA10103-DPB14001 DPA10103-DPB14101 DPA10103-DPB14801 DPA10103-DPB14901 DPA10103-DPB15001 DPA10103-DPB15101 DPA10103-DPB15501 DPA10103-DPB15901 DPA10103-DPB18001 DPA10104-DPB10101 DPA10104-DPB11501 DPA10105-DPB10101 DPA10105-DPB10401 DPA10105-DPB11801 DPA10105-DPB15001 DPA10106-DPB10101 DPA10201-DPB10101 DPA10201-DPB10201 DPA10201-DPB10202 DPA10201-DPB10401 DPA10201-DPB10501 DPA10201-DPB110601 DPA10201-DPB11501 DPA10201-DPB11601 DPA10201-DPB11901 DPA10201-DPB13401 DPA10201-DPB15501 DPA10202-DPB10101 DPA10202-DPB10201 DPA10202-DPB10202 DPA10202-DPB10401 DPA10202-DPB10501 DPA10202-DPB110601 DPA10202-DPB11101 DPA10202-DPB11301 DPA10202-DPB11801 DPA10202-DPB11901 DPA10202-DPB13101 DPA10202-DPB13801; note = HLAs: DPA10202-DPB15501 DPA10202-DPB16501 DPA10301-DPB10101 DPA10301-DPB10201 DPA10301-DPB10202 DPA10301-DPB10401 DPA10301-DPB10402 DPA10301-DPB110501 DPA10301-DPB110601 DPA10301-DPB11101 DPA10301-DPB11301 DPA10301-DPB11801 DPA10301-DPB12301 DPA10301-DPB13901 DPA10301-DPB14001 DPA10301-DPB14901 DPA10301-DPB15501 DPA10301-DPB16501 DPA10301-DPB17501 DPA10301-DPB18001 DPA10401-DPB10101 DPA10401-DPB10201 DPA10401-DPB10202 DPA10401-DPB10402 DPA10401-DPB10501 DPA10401-DPB110501 DPA10401-DPB14901
KEPPFLWWGFELMPDKWTVQ

SEQ ID NO: 6703 - protein, 14 aa, synthetic construct
  source 1..14: note = Seed: PPFLWMGYELHPDK; note = HLAs: DRB1_1001 DPA10103-DPB10101 DPA10103-DPB10201 DPA10103-DPB10202 DPA10103-DPB10401 DPA10103-DPB112601 DPA10103-DPB11501 DPA10103-DPB11601 DPA10103-DPB11901 DPA10103-DPB12301 DPA10103-DPB13101 DPA10103-DPB13401 DPA10103-DPB13901 DPA10103-DPB14001 DPA10103-DPB14101 DPA10103-DPB14801 DPA10103-DPB15001 DPA10103-DPB15901 DPA10104-DPB10101 DPA10104-DPB11501 DPA10105-DPB10101 DPA10105-DPB10401 DPA10105-DPB15001 DPA10106-DPB10101 DPA10201-DPB10101 DPA10201-DPB110601 DPA10201-DPB11501 DPA10201-DPB11601 DPA10201-DPB11901 DPA10202-DPB10101 DPA10202-DPB10201 DPA10202-DPB10202 DPA10202-DPB10401 DPA10202-DPB110601 DPA10202-DPB11901 DPA10202-DPB13101 DPA10202-DPB16501 DPA10301-DPB10101 DPA10301-DPB10201 DPA10301-DPB10202 DPA10301-DPB10401 DPA10301-DPB10402 DPA10301-DPB110501 DPA10301-DPB110601 DPA10301-DPB11801 DPA10301-DPB12301 DPA10301-DPB13901 DPA10301-DPB14001 DPA10301-DPB14901 DPA10301-DPB15501 DPA10301-DPB16501 DPA10301-DPB17501 DPA10301-DPB18001 DPA10401-DPB10101 DPA10401-DPB10201; note = HLAs: DPA10401-DPB10202 DPA10401-DPB10402 DPA10401-DPB10501 DPA10401-DPB110501 DPA10401-DPB14901
PPFLWLGYELFPDK

SEQ ID NO: 6704 - protein, 20 aa, synthetic construct
  source 1..20: note = Seed: KEPPFLWMGYELHPDKWTVQ; note = HLAs: DRB1_0101 DPA10103-DPB10101 DPA10103-DPB10201 DPA10103-DPB10202 DPA10103-DPB10401 DPA10103-DPB10402 DPA10103-DPB10501 DPA10103-DPB110501 DPA10103-DPB112601 DPA10103-DPB11501 DPA10103-DPB11601 DPA10103-DPB11801 DPA10103-DPB11901 DPA10103-DPB12301 DPA10103-DPB13101 DPA10103-DPB13401 DPA10103-DPB13901 DPA10103-DPB14001 DPA10103-DPB14101 DPA10103-DPB14801 DPA10103-DPB14901 DPA10103-DPB15001 DPA10103-DPB15101 DPA10103-DPB15501 DPA10103-DPB15901 DPA10103-DPB18001 DPA10104-DPB10101 DPA10104-DPB11501 DPA10105-DPB10101 DPA10105-DPB10401 DPA10105-DPB11801 DPA10105-DPB15001 DPA10106-DPB10101 DPA10201-DPB10101 DPA10201-DPB10201 DPA10201-DPB10202 DPA10201-DPB10401 DPA10201-DPB10501 DPA10201-DPB110601 DPA10201-DPB11501 DPA10201-DPB11601 DPA10201-DPB11901 DPA10201-DPB13401 DPA10201-DPB15501 DPA10202-DPB10101 DPA10202-DPB10201 DPA10202-DPB10202 DPA10202-DPB10401 DPA10202-DPB10501 DPA10202-DPB110601 DPA10202-DPB11101 DPA10202-DPB11301 DPA10202-DPB11801 DPA10202-DPB11901 DPA10202-DPB13101; note = HLAs: DPA10202-DPB13801 DPA10202-DPB15501 DPA10202-DPB16501 DPA10301-DPB10101 DPA10301-DPB10201 DPA10301-DPB10202 DPA10301-DPB10401 DPA10301-DPB10402 DPA10301-DPB110501 DPA10301-DPB110601 DPA10301-DPB11101 DPA10301-DPB11301 DPA10301-DPB11801 DPA10301-DPB12301 DPA10301-DPB13901 DPA10301-DPB14001 DPA10301-DPB14901 DPA10301-DPB15501 DPA10301-DPB16501 DPA10301-DPB17501 DPA10301-DPB18001 DPA10401-DPB10101 DPA10401-DPB10201 DPA10401-DPB10202 DPA10401-DPB10402 DPA10401-DPB10501 DPA10401-DPB110501 DPA10401-DPB14901
KEPPFLWMGFELFPDKWTVQ

SEQ ID NO: 6705 - protein, 14 aa, synthetic construct
  source 1..14: note = Seed: PPFLWMGYELHPDK; note = HLAs: DPA10103-DPB10101 DPA10103-DPB10201 DPA10103-DPB10202 DPA10103-DPB10401 DPA10103-DPB112601 DPA10103-DPB11501 DPA10103-DPB11601 DPA10103-DPB11901 DPA10103-DPB12301 DPA10103-DPB13101 DPA10103-DPB13401 DPA10103-DPB13901 DPA10103-DPB14001 DPA10103-DPB14101 DPA10103-DPB14801 DPA10103-DPB15001 DPA10103-DPB15901 DPA10104-DPB10101 DPA10104-DPB11501 DPA10105-DPB10101 DPA10105-DPB10401 DPA10105-DPB15001 DPA10106-DPB10101 DPA10201-DPB10101 DPA10201-DPB110601 DPA10201-DPB11501 DPA10201-DPB11601 DPA10201-DPB11901 DPA10202-DPB10101 DPA10202-DPB10201 DPA10202-DPB10202 DPA10202-DPB10401 DPA10202-DPB110601 DPA10202-DPB11901 DPA10202-DPB13101 DPA10202-DPB16501 DPA10301-DPB10101 DPA10301-DPB10201 DPA10301-DPB10202 DPA10301-DPB10401 DPA10301-DPB10402 DPA10301-DPB110501 DPA10301-DPB110601 DPA10301-DPB11801 DPA10301-DPB12301 DPA10301-DPB13901 DPA10301-DPB14001 DPA10301-DPB14901 DPA10301-DPB15501 DPA10301-DPB16501 DPA10301-DPB17501 DPA10301-DPB18001 DPA10401-DPB10101 DPA10401-DPB10201; note = HLAs: DPA10401-DPB10202 DPA10401-DPB10402 DPA10401-DPB10501 DPA10401-DPB110501 DPA10401-DPB14901
PPFLWEGFELEPDK

SEQ ID NO: 6706 - protein, 20 aa, synthetic construct
  source 1..20: note = Seed: KEPPFLWMGYELHPDKWTVQ; note = HLAs: DPA10103-DPB10101 DPA10103-DPB10201 DPA10103-DPB10202 DPA10103-DPB10401 DPA10103-DPB10402 DPA10103-DPB10501 DPA10103-DPB110501 DPA10103-DPB112601 DPA10103-DPB11501 DPA10103-DPB11601 DPA10103-DPB11801 DPA10103-DPB11901 DPA10103-DPB12301 DPA10103-DPB13101 DPA10103-DPB13401 DPA10103-DPB13901 DPA10103-DPB14001 DPA10103-DPB14101 DPA10103-DPB14801 DPA10103-DPB14901 DPA10103-DPB15001 DPA10103-DPB15101 DPA10103-DPB15501 DPA10103-DPB15901 DPA10103-DPB18001 DPA10104-DPB10101 DPA10104-DPB11501 DPA10105-DPB10101 DPA10105-DPB10401 DPA10105-DPB11801 DPA10105-DPB15001 DPA10106-DPB10101 DPA10201-DPB10101 DPA10201-DPB10201 DPA10201-DPB10202 DPA10201-DPB10401 DPA10201-DPB10501 DPA10201-DPB110601 DPA10201-DPB11501 DPA10201-DPB11601 DPA10201-DPB11901 DPA10201-DPB13401 DPA10201-DPB15501 DPA10202-DPB10101 DPA10202-DPB10201 DPA10202-DPB10202 DPA10202-DPB10401 DPA10202-DPB10501 DPA10202-DPB110601 DPA10202-DPB11101 DPA10202-DPB11301 DPA10202-DPB11801 DPA10202-DPB11901 DPA10202-DPB13101 DPA10202-DPB13801; note = HLAs: DPA10202-DPB15501 DPA10202-DPB16501 DPA10301-DPB10101 DPA10301-DPB10201 DPA10301-DPB10202 DPA10301-DPB10401 DPA10301-DPB10402 DPA10301-DPB110501 DPA10301-DPB110601 DPA10301-DPB11101 DPA10301-DPB11301 DPA10301-DPB11801 DPA10301-DPB12301 DPA10301-DPB13901 DPA10301-DPB14001 DPA10301-DPB14901 DPA10301-DPB15501 DPA10301-DPB16501 DPA10301-DPB17501 DPA10301-DPB18001 DPA10401-DPB10101 DPA10401-DPB10201 DPA10401-DPB10202 DPA10401-DPB10402 DPA10401-DPB10501 DPA10401-DPB110501 DPA10401-DPB14901
KEPPFLWVGFELRPDKWTVQ

SEQ ID NO: 6707 - protein, 20 aa, synthetic construct
  source 1..20: note = Seed: KEPPFLWMGYELHPDKWTVQ; note = HLAs: DPA10103-DPB10101 DPA10103-DPB10201 DPA10103-DPB10202 DPA10103-DPB10401 DPA10103-DPB10402 DPA10103-DPB10501 DPA10103-DPB110501 DPA10103-DPB112601 DPA10103-DPB11501 DPA10103-DPB11601 DPA10103-DPB11801 DPA10103-DPB11901 DPA10103-DPB12301 DPA10103-DPB13101 DPA10103-DPB13401 DPA10103-DPB13901 DPA10103-DPB14001 DPA10103-DPB14101 DPA10103-DPB14801 DPA10103-DPB14901 DPA10103-DPB15001 DPA10103-DPB15101 DPA10103-DPB15501 DPA10103-DPB15901 DPA10103-DPB18001 DPA10104-DPB10101 DPA10104-DPB11501 DPA10105-DPB10101 DPA10105-DPB10401 DPA10105-DPB11801 DPA10105-DPB15001 DPA10106-DPB10101 DPA10201-DPB10101 DPA10201-DPB10201 DPA10201-DPB10202 DPA10201-DPB10401 DPA10201-DPB10501 DPA10201-DPB110601 DPA10201-DPB11501 DPA10201-DPB11601 DPA10201-DPB11901 DPA10201-DPB13401 DPA10201-DPB15501 DPA10202-DPB10101 DPA10202-DPB10201 DPA10202-DPB10202 DPA10202-DPB10401 DPA10202-DPB10501 DPA10202-DPB110601 DPA10202-DPB11101 DPA10202-DPB11301 DPA10202-DPB11801 DPA10202-DPB11901 DPA10202-DPB13101 DPA10202-DPB13801; note = HLAs: DPA10202-DPB15501 DPA10202-DPB16501 DPA10301-DPB10101 DPA10301-DPB10201 DPA10301-DPB10202 DPA10301-DPB10401 DPA10301-DPB10402 DPA10301-DPB110501 DPA10301-DPB110601 DPA10301-DPB11101 DPA10301-DPB11301 DPA10301-DPB11801 DPA10301-DPB12301 DPA10301-DPB13901 DPA10301-DPB14001 DPA10301-DPB14901 DPA10301-DPB15501 DPA10301-DPB16501 DPA10301-DPB17501 DPA10301-DPB18001 DPA10401-DPB10101 DPA10401-DPB10201 DPA10401-DPB10202 DPA10401-DPB10402 DPA10401-DPB10501 DPA10401-DPB110501 DPA10401-DPB14901
KEPPFLWEGFELHPDKWTVQ

SEQ ID NO: 6708 - protein, 20 aa, synthetic construct
  source 1..20: note = Seed: KEPPFLWMGYELHPDKWTVQ; note = HLAs: DPA10103-DPB10101 DPA10103-DPB10201 DPA10103-DPB10202 DPA10103-DPB10401 DPA10103-DPB10402 DPA10103-DPB10501 DPA10103-DPB110501 DPA10103-DPB112601 DPA10103-DPB11501 DPA10103-DPB11601 DPA10103-DPB11801 DPA10103-DPB11901 DPA10103-DPB12301 DPA10103-DPB13101 DPA10103-DPB13401 DPA10103-DPB13901 DPA10103-DPB14001 DPA10103-DPB14101 DPA10103-DPB14801 DPA10103-DPB14901 DPA10103-DPB15001 DPA10103-DPB15101 DPA10103-DPB15501 DPA10103-DPB15901 DPA10103-DPB18001 DPA10104-DPB10101 DPA10104-DPB11501 DPA10105-DPB10101 DPA10105-DPB10401 DPA10105-DPB11801 DPA10105-DPB15001 DPA10106-DPB10101 DPA10201-DPB10101 DPA10201-DPB10201 DPA10201-DPB10202 DPA10201-DPB10401 DPA10201-DPB10501 DPA10201-DPB110601 DPA10201-DPB11501 DPA10201-DPB11601 DPA10201-DPB11901 DPA10201-DPB13401 DPA10201-DPB15501 DPA10202-DPB10101 DPA10202-DPB10201 DPA10202-DPB10202 DPA10202-DPB10401 DPA10202-DPB10501 DPA10202-DPB110601 DPA10202-DPB11101 DPA10202-DPB11301 DPA10202-DPB11801 DPA10202-DPB11901 DPA10202-DPB13101 DPA10202-DPB13801; note = HLAs: DPA10202-DPB15501 DPA10202-DPB16501 DPA10301-DPB10101 DPA10301-DPB10201 DPA10301-DPB10202 DPA10301-DPB10401 DPA10301-DPB10402 DPA10301-DPB110501 DPA10301-DPB110601 DPA10301-DPB11101 DPA10301-DPB11301 DPA10301-DPB11801 DPA10301-DPB12301 DPA10301-DPB13901 DPA10301-DPB14001 DPA10301-DPB14901 DPA10301-DPB15501 DPA10301-DPB16501 DPA10301-DPB17501 DPA10301-DPB18001 DPA10401-DPB10101 DPA10401-DPB10201 DPA10401-DPB10202 DPA10401-DPB10402 DPA10401-DPB10501 DPA10401-DPB110501 DPA10401-DPB14901
KEPPFLWDGFELMPDKWTVQ

SEQ ID NO: 6709 - protein, 14 aa, synthetic construct
  source 1..14: note = Seed: PPFLWMGYELHPDK; note = HLAs: DRB1_1001 DPA10103-DPB10101 DPA10103-DPB10201 DPA10103-DPB10202 DPA10103-DPB10401 DPA10103-DPB112601 DPA10103-DPB11501 DPA10103-DPB11601 DPA10103-DPB11901 DPA10103-DPB12301 DPA10103-DPB13101 DPA10103-DPB13401 DPA10103-DPB13901 DPA10103-DPB14001 DPA10103-DPB14101 DPA10103-DPB14801 DPA10103-DPB15001 DPA10103-DPB15901 DPA10104-DPB10101 DPA10104-DPB11501 DPA10105-DPB10101 DPA10105-DPB10401 DPA10105-DPB15001 DPA10106-DPB10101 DPA10201-DPB10101 DPA10201-DPB110601 DPA10201-DPB11501 DPA10201-DPB11601 DPA10201-DPB11901 DPA10202-DPB10101 DPA10202-DPB10201 DPA10202-DPB10202 DPA10202-DPB10401 DPA10202-DPB110601 DPA10202-DPB11901 DPA10202-DPB13101 DPA10202-DPB16501 DPA10301-DPB10101 DPA10301-DPB10201 DPA10301-DPB10202 DPA10301-DPB10401 DPA10301-DPB10402 DPA10301-DPB110501 DPA10301-DPB110601 DPA10301-DPB11801 DPA10301-DPB12301 DPA10301-DPB13901 DPA10301-DPB14001 DPA10301-DPB14901 DPA10301-DPB16501 DPA10301-DPB17501 DPA10301-DPB18001 DPA10401-DPB10101 DPA10401-DPB10201 DPA10401-DPB10202; note = HLAs: DPA10401-DPB10402 DPA10401-DPB10501 DPA10401-DPB110501 DPA10401-DPB14901
PPILWMGFELLPDK

SEQ ID NO: 6710 - protein, 14 aa, synthetic construct
  source 1..14: note = Seed: PPFLWMGYELHPDK; note = HLAs: DPA10103-DPB10101 DPA10103-DPB10201 DPA10103-DPB10202 DPA10103-DPB10401 DPA10103-DPB112601 DPA10103-DPB11501 DPA10103-DPB11601 DPA10103-DPB11901 DPA10103-DPB12301 DPA10103-DPB13101 DPA10103-DPB13401 DPA10103-DPB13901 DPA10103-DPB14001 DPA10103-DPB14101 DPA10103-DPB14801 DPA10103-DPB15001 DPA10103-DPB15901 DPA10104-DPB10101 DPA10104-DPB11501 DPA10105-DPB10101 DPA10105-DPB10401 DPA10105-DPB15001 DPA10106-DPB10101 DPA10201-DPB10101 DPA10201-DPB110601 DPA10201-DPB11501 DPA10201-DPB11601 DPA10201-DPB11901 DPA10202-DPB10101 DPA10202-DPB10201 DPA10202-DPB10202 DPA10202-DPB10401 DPA10202-DPB110601 DPA10202-DPB11901 DPA10202-DPB13101 DPA10202-DPB16501 DPA10301-DPB10101 DPA10301-DPB10201 DPA10301-DPB10202 DPA10301-DPB10401 DPA10301-DPB10402 DPA10301-DPB110501 DPA10301-DPB110601 DPA10301-DPB11801 DPA10301-DPB12301 DPA10301-DPB13901 DPA10301-DPB14001 DPA10301-DPB14901 DPA10301-DPB15501 DPA10301-DPB16501 DPA10301-DPB17501 DPA10301-DPB18001 DPA10401-DPB10101 DPA10401-DPB10201; note = HLAs: DPA10401-DPB10202 DPA10401-DPB10402 DPA10401-DPB10501 DPA10401-DPB110501 DPA10401-DPB14901
PPYLWWGFELLPDK

SEQ ID NO: 6711 - protein, 20 aa, synthetic construct
  source 1..20: note = Seed: KEPPFLWMGYELHPDKWTVQ; note = HLAs: DRB1_1001 DPA10103-DPB10101 DPA10103-DPB10201 DPA10103-DPB10202 DPA10103-DPB10401 DPA10103-DPB10402 DPA10103-DPB10501 DPA10103-DPB110501 DPA10103-DPB112601 DPA10103-DPB11501 DPA10103-DPB11601 DPA10103-DPB11801 DPA10103-DPB11901 DPA10103-DPB12301 DPA10103-DPB13101 DPA10103-DPB13401 DPA10103-DPB13901 DPA10103-DPB14001 DPA10103-DPB14101 DPA10103-DPB14801 DPA10103-DPB14901 DPA10103-DPB15001 DPA10103-DPB15101 DPA10103-DPB15501 DPA10103-DPB15901 DPA10103-DPB18001 DPA10104-DPB10101 DPA10104-DPB11501 DPA10105-DPB10101 DPA10105-DPB10401 DPA10105-DPB11801 DPA10105-DPB15001 DPA10106-DPB10101 DPA10201-DPB10101 DPA10201-DPB10201 DPA10201-DPB10202 DPA10201-DPB10401 DPA10201-DPB10501 DPA10201-DPB110601 DPA10201-DPB11501 DPA10201-DPB11601 DPA10201-DPB11901 DPA10201-DPB13401 DPA10201-DPB15501 DPA10202-DPB10101 DPA10202-DPB10201 DPA10202-DPB10202 DPA10202-DPB10401 DPA10202-DPB10501 DPA10202-DPB110601 DPA10202-DPB11101 DPA10202-DPB11301 DPA10202-DPB11801 DPA10202-DPB11901 DPA10202-DPB13101; note = HLAs: DPA10202-DPB13801 DPA10202-DPB15501 DPA10202-DPB16501 DPA10301-DPB10101 DPA10301-DPB10201 DPA10301-DPB10202 DPA10301-DPB10401 DPA10301-DPB10402 DPA10301-DPB110501 DPA10301-DPB110601 DPA10301-DPB11101 DPA10301-DPB11301 DPA10301-DPB11801 DPA10301-DPB12301 DPA10301-DPB13901 DPA10301-DPB14001 DPA10301-DPB14901 DPA10301-DPB15501 DPA10301-DPB16501 DPA10301-DPB17501 DPA10301-DPB18001 DPA10401-DPB10101 DPA10401-DPB10201 DPA10401-DPB10202 DPA10401-DPB10402 DPA10401-DPB10501 DPA10401-DPB110501 DPA10401-DPB14901
KEPPYLWTGFELNPDKWTVQ

SEQ ID NO: 6712 - protein, 20 aa, synthetic construct
  source 1..20: note = Seed: KEPPFLWMGYELHPDKWTVQ; note = HLAs: DRB1_0101 DRB1_1001 DPA10103-DPB10101 DPA10103-DPB10201 DPA10103-DPB10202 DPA10103-DPB10401 DPA10103-DPB10402 DPA10103-DPB10501 DPA10103-DPB110501 DPA10103-DPB112601 DPA10103-DPB11501 DPA10103-DPB11601 DPA10103-DPB11801 DPA10103-DPB11901 DPA10103-DPB12301 DPA10103-DPB13101 DPA10103-DPB13401 DPA10103-DPB13901 DPA10103-DPB14001 DPA10103-DPB14101 DPA10103-DPB14801 DPA10103-DPB14901 DPA10103-DPB15001 DPA10103-DPB15101 DPA10103-DPB15501 DPA10103-DPB15901 DPA10103-DPB18001 DPA10104-DPB10101 DPA10104-DPB11501 DPA10105-DPB10101 DPA10105-DPB10401 DPA10105-DPB11801 DPA10105-DPB15001 DPA10106-DPB10101 DPA10201-DPB10101 DPA10201-DPB10201 DPA10201-DPB10202 DPA10201-DPB10401 DPA10201-DPB10501 DPA10201-DPB110601 DPA10201-DPB11501 DPA10201-DPB11601 DPA10201-DPB11901 DPA10201-DPB13401 DPA10201-DPB15501 DPA10202-DPB10101 DPA10202-DPB10201 DPA10202-DPB10202 DPA10202-DPB10501 DPA10202-DPB110601 DPA10202-DPB11101 DPA10202-DPB11301 DPA10202-DPB11801 DPA10202-DPB11901 DPA10202-DPB13101; note = HLAs: DPA10202-DPB13801 DPA10202-DPB15501 DPA10202-DPB16501 DPA10301-DPB10101 DPA10301-DPB10201 DPA10301-DPB10202 DPA10301-DPB10401 DPA10301-DPB10402 DPA10301-DPB110501 DPA10301-DPB110601 DPA10301-DPB11101 DPA10301-DPB11301 DPA10301-DPB11801 DPA10301-DPB12301 DPA10301-DPB13901 DPA10301-DPB14001 DPA10301-DPB14901 DPA10301-DPB15501 DPA10301-DPB16501 DPA10301-DPB17501 DPA10301-DPB18001 DPA10401-DPB10101 DPA10401-DPB10201 DPA10401-DPB10202 DPA10401-DPB10402 DPA10401-DPB10501 DPA10401-DPB110501 DPA10401-DPB14901
KEPPFLWAGIELLPDKWTVQ

SEQ ID NO: 6713 - protein, 20 aa, synthetic construct
  source 1..20: note = Seed: KEPPFLWMGYELHPDKWTVQ; note = HLAs: DPA10103-DPB10101 DPA10103-DPB10201 DPA10103-DPB10202 DPA10103-DPB10401 DPA10103-DPB10402 DPA10103-DPB10501 DPA10103-DPB110501 DPA10103-DPB112601 DPA10103-DPB11501 DPA10103-DPB11601 DPA10103-DPB11801 DPA10103-DPB11901 DPA10103-DPB12301 DPA10103-DPB13101 DPA10103-DPB13401 DPA10103-DPB13901 DPA10103-DPB14001 DPA10103-DPB14101 DPA10103-DPB14801 DPA10103-DPB14901 DPA10103-DPB15001 DPA10103-DPB15101 DPA10103-DPB15501 DPA10103-DPB15901 DPA10103-DPB18001 DPA10104-DPB10101 DPA10104-DPB11501 DPA10105-DPB10101 DPA10105-DPB10401 DPA10105-DPB11801 DPA10105-DPB15001 DPA10106-DPB10101 DPA10201-DPB10101 DPA10201-DPB10201 DPA10201-DPB10202 DPA10201-DPB10401 DPA10201-DPB10501 DPA10201-DPB110601 DPA10201-DPB11501 DPA10201-DPB11601 DPA10201-DPB11901 DPA10201-DPB13401 DPA10201-DPB15501 DPA10202-DPB10101 DPA10202-DPB10201 DPA10202-DPB10202 DPA10202-DPB10401 DPA10202-DPB10501 DPA10202-DPB110601 DPA10202-DPB11101 DPA10202-DPB11301 DPA10202-DPB11801 DPA10202-DPB11901 DPA10202-DPB13101 DPA10202-DPB13801; note = HLAs: DPA10202-DPB15501 DPA10202-DPB16501 DPA10301-DPB10101 DPA10301-DPB10201 DPA10301-DPB10202 DPA10301-DPB10401 DPA10301-DPB10402 DPA10301-DPB110501 DPA10301-DPB110601 DPA10301-DPB11101 DPA10301-DPB11301 DPA10301-DPB11801 DPA10301-DPB12301 DPA10301-DPB13901 DPA10301-DPB14001 DPA10301-DPB14901 DPA10301-DPB15501 DPA10301-DPB16501 DPA10301-DPB17501 DPA10301-DPB18001 DPA10401-DPB10101 DPA10401-DPB10201 DPA10401-DPB10202 DPA10401-DPB10402 DPA10401-DPB10501 DPA10401-DPB110501 DPA10401-DPB14901
KEPPMLWHGFELVPDKWTVQ

SEQ ID NO: 6714 - protein, 14 aa, synthetic construct
  source 1..14: note = Seed: PPFLWMGYELHPDK; note = HLAs: DRB1_1001 DPA10103-DPB10101 DPA10103-DPB10201 DPA10103-DPB10202 DPA10103-DPB10401 DPA10103-DPB112601 DPA10103-DPB11501 DPA10103-DPB11601 DPA10103-DPB11901 DPA10103-DPB12301 DPA10103-DPB13101 DPA10103-DPB13401 DPA10103-DPB13901 DPA10103-DPB14001 DPA10103-DPB14101 DPA10103-DPB14801 DPA10103-DPB15001 DPA10103-DPB15901 DPA10104-DPB10101 DPA10104-DPB11501 DPA10105-DPB10101 DPA10105-DPB10401 DPA10105-DPB15001 DPA10106-DPB10101 DPA10201-DPB10101 DPA10201-DPB110601 DPA10201-DPB11501 DPA10201-DPB11601 DPA10201-DPB11901 DPA10202-DPB10101 DPA10202-DPB10201 DPA10202-DPB10202 DPA10202-DPB10401 DPA10202-DPB110601 DPA10202-DPB11901 DPA10202-DPB13101 DPA10202-DPB16501 DPA10301-DPB10101 DPA10301-DPB10201 DPA10301-DPB10202 DPA10301-DPB10401 DPA10301-DPB10402 DPA10301-DPB110501 DPA10301-DPB110601 DPA10301-DPB11801 DPA10301-DPB12301 DPA10301-DPB13901 DPA10301-DPB14001 DPA10301-DPB14901 DPA10301-DPB15501 DPA10301-DPB16501 DPA10301-DPB17501 DPA10301-DPB18001 DPA10401-DPB10101 DPA10401-DPB10201; note = HLAs: DPA10401-DPB10202 DPA10401-DPB10402 DPA10401-DPB10501 DPA10401-DPB110501 DPA10401-DPB14901
PPFLWLGFELHPDK

SEQ ID NO: 6715 - protein, 20 aa, synthetic construct
  source 1..20: note = Seed: KEPPFLWMGYELHPDKWTVQ; note = HLAs: DRB1_0101 DPA10103-DPB10101 DPA10103-DPB10201 DPA10103-DPB10202 DPA10103-DPB10401 DPA10103-DPB10402 DPA10103-DPB10501 DPA10103-DPB110501 DPA10103-DPB112601 DPA10103-DPB11501 DPA10103-DPB11601 DPA10103-DPB11801 DPA10103-DPB11901 DPA10103-DPB12301 DPA10103-DPB13101 DPA10103-DPB13401 DPA10103-DPB13901 DPA10103-DPB14001 DPA10103-DPB14101 DPA10103-DPB14801 DPA10103-DPB14901 DPA10103-DPB15001 DPA10103-DPB15101 DPA10103-DPB15501 DPA10103-DPB15901 DPA10103-DPB18001 DPA10104-DPB10101 DPA10104-DPB11501 DPA10105-DPB10101 DPA10105-DPB10401 DPA10105-DPB11801 DPA10105-DPB15001 DPA10106-DPB10101 DPA10201-DPB10101 DPA10201-DPB10201 DPA10201-DPB10202 DPA10201-DPB10401 DPA10201-DPB10501 DPA10201-DPB110601 DPA10201-DPB11501 DPA10201-DPB11601 DPA10201-DPB11901 DPA10201-DPB13401 DPA10201-DPB15501 DPA10202-DPB10101 DPA10202-DPB10201 DPA10202-DPB10202 DPA10202-DPB10401 DPA10202-DPB10501 DPA10202-DPB110601 DPA10202-DPB11101 DPA10202-DPB11301 DPA10202-DPB11801 DPA10202-DPB11901 DPA10202-DPB13101; note = HLAs: DPA10202-DPB13801 DPA10202-DPB15501 DPA10202-DPB16501 DPA10301-DPB10101 DPA10301-DPB10201 DPA10301-DPB10202 DPA10301-DPB10401 DPA10301-DPB10402 DPA10301-DPB110501 DPA10301-DPB110601 DPA10301-DPB11101 DPA10301-DPB11301 DPA10301-DPB11801 DPA10301-DPB12301 DPA10301-DPB13901 DPA10301-DPB14001 DPA10301-DPB14901 DPA10301-DPB15501 DPA10301-DPB16501 DPA10301-DPB17501 DPA10301-DPB18001 DPA10401-DPB10101 DPA10401-DPB10201 DPA10401-DPB10202 DPA10401-DPB10402 DPA10401-DPB10501 DPA10401-DPB110501 DPA10401-DPB14901
KEPPFLWYGFELVPDKWTVQ

SEQ ID NO: 6716 - protein, 14 aa, synthetic construct
  source 1..14: note = Seed: PPFLWMGYELHPDK; note = HLAs: DPA10103-DPB10101 DPA10103-DPB10201 DPA10103-DPB10202 DPA10103-DPB10401 DPA10103-DPB112601 DPA10103-DPB11501 DPA10103-DPB11601 DPA10103-DPB11901 DPA10103-DPB12301 DPA10103-DPB13101 DPA10103-DPB13401 DPA10103-DPB13901 DPA10103-DPB14001 DPA10103-DPB14101 DPA10103-DPB14801 DPA10103-DPB15001 DPA10103-DPB15901 DPA10104-DPB10101 DPA10104-DPB11501 DPA10105-DPB10101 DPA10105-DPB10401 DPA10105-DPB15001 DPA10106-DPB10101 DPA10201-DPB10101 DPA10201-DPB110601 DPA10201-DPB11501 DPA10201-DPB11601 DPA10201-DPB11901 DPA10202-DPB10101 DPA10202-DPB10201 DPA10202-DPB10202 DPA10202-DPB10401 DPA10202-DPB110601 DPA10202-DPB11901 DPA10202-DPB13101 DPA10202-DPB16501 DPA10301-DPB10101 DPA10301-DPB10201 DPA10301-DPB10202 DPA10301-DPB10401 DPA10301-DPB10402 DPA10301-DPB110501 DPA10301-DPB110601 DPA10301-DPB11801 DPA10301-DPB12301 DPA10301-DPB13901 DPA10301-DPB14001 DPA10301-DPB14901 DPA10301-DPB16501 DPA10301-DPB17501 DPA10301-DPB18001 DPA10401-DPB10101 DPA10401-DPB10201 DPA10401-DPB10202; note = HLAs: DPA10401-DPB10402 DPA10401-DPB10501 DPA10401-DPB110501 DPA10401-DPB14901
PPILWKGFELLPDK

SEQ ID NO: 6717 - protein, 14 aa, synthetic construct
  source 1..14: note = Seed: PPFLWMGYELHPDK; note = HLAs: DRB1_1001 DPA10103-DPB10101 DPA10103-DPB10201 DPA10103-DPB10202 DPA10103-DPB10401 DPA10103-DPB112601 DPA10103-DPB11501 DPA10103-DPB11601 DPA10103-DPB11901 DPA10103-DPB12301 DPA10103-DPB13101 DPA10103-DPB13401 DPA10103-DPB13901 DPA10103-DPB14001 DPA10103-DPB14101 DPA10103-DPB14801 DPA10103-DPB15001 DPA10103-DPB15901 DPA10104-DPB10101 DPA10104-DPB11501 DPA10105-DPB10101 DPA10105-DPB10401 DPA10105-DPB15001 DPA10106-DPB10101 DPA10201-DPB10101 DPA10201-DPB110601 DPA10201-DPB11501 DPA10201-DPB11601 DPA10201-DPB11901 DPA10202-DPB10101 DPA10202-DPB10201 DPA10202-DPB10202 DPA10202-DPB10401 DPA10202-DPB110601 DPA10202-DPB11901 DPA10202-DPB13101 DPA10202-DPB16501 DPA10301-DPB10101 DPA10301-DPB10201 DPA10301-DPB10202 DPA10301-DPB10401 DPA10301-DPB10402 DPA10301-DPB110501 DPA10301-DPB110601 DPA10301-DPB11801 DPA10301-DPB12301 DPA10301-DPB13901 DPA10301-DPB14001 DPA10301-DPB14901 DPA10301-DPB15501 DPA10301-DPB16501 DPA10301-DPB17501 DPA10301-DPB18001 DPA10401-DPB10101 DPA10401-DPB10201; note = HLAs: DPA10401-DPB10202 DPA10401-DPB10402 DPA10401-DPB10501 DPA10401-DPB110501 DPA10401-DPB14901
PPFLWCGFELMPDK

SEQ ID NO: 6718 - protein, 20 aa, synthetic construct
  source 1..20: note = Seed: KEPPFLWMGYELHPDKWTVQ; note = HLAs: DPA10103-DPB10101 DPA10103-DPB10201 DPA10103-DPB10202 DPA10103-DPB10401 DPA10103-DPB10402 DPA10103-DPB10501 DPA10103-DPB110501 DPA10103-DPB112601 DPA10103-DPB11501 DPA10103-DPB11601 DPA10103-DPB11801 DPA10103-DPB11901 DPA10103-DPB12301 DPA10103-DPB13101 DPA10103-DPB13401 DPA10103-DPB13901 DPA10103-DPB14001 DPA10103-DPB14101 DPA10103-DPB14801 DPA10103-DPB14901 DPA10103-DPB15001 DPA10103-DPB15101 DPA10103-DPB15501 DPA10103-DPB15901 DPA10103-DPB18001 DPA10104-DPB10101 DPA10104-DPB11501 DPA10105-DPB10101 DPA10105-DPB10401 DPA10105-DPB11801 DPA10105-DPB15001 DPA10106-DPB10101 DPA10201-DPB10101 DPA10201-DPB10201 DPA10201-DPB10202 DPA10201-DPB10401 DPA10201-DPB10501 DPA10201-DPB110601 DPA10201-DPB11501 DPA10201-DPB11601 DPA10201-DPB11901 DPA10201-DPB13401 DPA10201-DPB15501 DPA10202-DPB10101 DPA10202-DPB10201 DPA10202-DPB10202 DPA10202-DPB10401 DPA10202-DPB10501 DPA10202-DPB110601 DPA10202-DPB11101 DPA10202-DPB11301 DPA10202-DPB11801 DPA10202-DPB11901 DPA10202-DPB13101 DPA10202-DPB13801; note = HLAs: DPA10202-DPB15501 DPA10202-DPB16501 DPA10301-DPB10101 DPA10301-DPB10201 DPA10301-DPB10202 DPA10301-DPB10401 DPA10301-DPB10402 DPA10301-DPB110501 DPA10301-DPB110601 DPA10301-DPB11101 DPA10301-DPB11301 DPA10301-DPB11801 DPA10301-DPB12301 DPA10301-DPB13901 DPA10301-DPB14001 DPA10301-DPB14901 DPA10301-DPB15501 DPA10301-DPB16501 DPA10301-DPB17501 DPA10301-DPB18001 DPA10401-DPB10101 DPA10401-DPB10201 DPA10401-DPB10202 DPA10401-DPB10402 DPA10401-DPB10501 DPA10401-DPB110501 DPA10401-DPB14901
KEPPFLWHGFELHPDKWTVQ

SEQ ID NO: 6719 - protein, 20 aa, synthetic construct
  source 1..20: note = Seed: KEPPFLWMGYELHPDKWTVQ; note = HLAs: DRB1_0101 DPA10103-DPB10101 DPA10103-DPB10201 DPA10103-DPB10202 DPA10103-DPB10401 DPA10103-DPB10402 DPA10103-DPB10501 DPA10103-DPB110501 DPA10103-DPB112601 DPA10103-DPB11501 DPA10103-DPB11601 DPA10103-DPB11801 DPA10103-DPB11901 DPA10103-DPB12301 DPA10103-DPB13101 DPA10103-DPB13401 DPA10103-DPB13901 DPA10103-DPB14001 DPA10103-DPB14101 DPA10103-DPB14801 DPA10103-DPB14901 DPA10103-DPB15001 DPA10103-DPB15101 DPA10103-DPB15501 DPA10103-DPB15901 DPA10103-DPB18001 DPA10104-DPB10101 DPA10104-DPB11501 DPA10105-DPB10101 DPA10105-DPB10401 DPA10105-DPB11801 DPA10105-DPB15001 DPA10106-DPB10101 DPA10201-DPB10101 DPA10201-DPB10201 DPA10201-DPB10202 DPA10201-DPB10401 DPA10201-DPB10501 DPA10201-DPB110601 DPA10201-DPB11501 DPA10201-DPB11601 DPA10201-DPB11901 DPA10201-DPB13401 DPA10201-DPB15501 DPA10202-DPB10101 DPA10202-DPB10201 DPA10202-DPB10202 DPA10202-DPB10401 DPA10202-DPB10501 DPA10202-DPB110601 DPA10202-DPB11101 DPA10202-DPB11301 DPA10202-DPB11801 DPA10202-DPB11901 DPA10202-DPB13101; note = HLAs: DPA10202-DPB13801 DPA10202-DPB15501 DPA10202-DPB16501 DPA10301-DPB10101 DPA10301-DPB10201 DPA10301-DPB10202 DPA10301-DPB10401 DPA10301-DPB10402 DPA10301-DPB110501 DPA10301-DPB110601 DPA10301-DPB11101 DPA10301-DPB11301 DPA10301-DPB11801 DPA10301-DPB12301 DPA10301-DPB13901 DPA10301-DPB14001 DPA10301-DPB14901 DPA10301-DPB15501 DPA10301-DPB16501 DPA10301-DPB17501 DPA10301-DPB18001 DPA10401-DPB10101 DPA10401-DPB10201 DPA10401-DPB10202 DPA10401-DPB10402 DPA10401-DPB10501 DPA10401-DPB110501 DPA10401-DPB14901
KEPPFLWEGLELLPDKWTVQ

SEQ ID NO: 6720 - protein, 14 aa, synthetic construct
  source 1..14: note = Seed: PPFLWMGYELHPDK; note = HLAs: DRB1_1001 DPA10103-DPB10101 DPA10103-DPB10201 DPA10103-DPB10202 DPA10103-DPB10401 DPA10103-DPB112601 DPA10103-DPB11501 DPA10103-DPB11601 DPA10103-DPB11901 DPA10103-DPB12301 DPA10103-DPB13101 DPA10103-DPB13401 DPA10103-DPB13901 DPA10103-DPB14001 DPA10103-DPB14101 DPA10103-DPB14801 DPA10103-DPB15001 DPA10103-DPB15901 DPA10104-DPB10101 DPA10104-DPB11501 DPA10105-DPB10101 DPA10105-DPB10401 DPA10105-DPB15001 DPA10106-DPB10101 DPA10201-DPB10101 DPA10201-DPB110601 DPA10201-DPB11501 DPA10201-DPB11601 DPA10201-DPB11901 DPA10202-DPB10101 DPA10202-DPB10201 DPA10202-DPB10202 DPA10202-DPB10401 DPA10202-DPB110601 DPA10202-DPB11901 DPA10202-DPB13101 DPA10202-DPB16501 DPA10301-DPB10101 DPA10301-DPB10201 DPA10301-DPB10202 DPA10301-DPB10401 DPA10301-DPB10402 DPA10301-DPB110501 DPA10301-DPB110601 DPA10301-DPB11801 DPA10301-DPB12301 DPA10301-DPB13901 DPA10301-DPB14001 DPA10301-DPB14901 DPA10301-DPB15501 DPA10301-DPB16501 DPA10301-DPB17501 DPA10301-DPB18001 DPA10401-DPB10101 DPA10401-DPB10201; note = HLAs: DPA10401-DPB10202 DPA10401-DPB10402 DPA10401-DPB10501 DPA10401-DPB110501 DPA10401-DPB14901
PPWLWMGFELLPDK

SEQ ID NO: 6721 - protein, 20 aa, synthetic construct
  source 1..20: note = Seed: KEPPFLWMGYELHPDKWTVQ; note = HLAs: DPA10103-DPB10101 DPA10103-DPB10201 DPA10103-DPB10202 DPA10103-DPB10401 DPA10103-DPB10402 DPA10103-DPB10501 DPA10103-DPB110501 DPA10103-DPB112601 DPA10103-DPB11501 DPA10103-DPB11601 DPA10103-DPB11801 DPA10103-DPB11901 DPA10103-DPB12301 DPA10103-DPB13101 DPA10103-DPB13401 DPA10103-DPB13901 DPA10103-DPB14001 DPA10103-DPB14101 DPA10103-DPB14801 DPA10103-DPB14901 DPA10103-DPB15001 DPA10103-DPB15101 DPA10103-DPB15501 DPA10103-DPB15901 DPA10103-DPB18001 DPA10104-DPB10101 DPA10104-DPB11501 DPA10105-DPB10101 DPA10105-DPB10401 DPA10105-DPB11801 DPA10105-DPB15001 DPA10106-DPB10101 DPA10201-DPB10101 DPA10201-DPB10201 DPA10201-DPB10202 DPA10201-DPB10401 DPA10201-DPB10501 DPA10201-DPB110601 DPA10201-DPB11501 DPA10201-DPB11601 DPA10201-DPB11901 DPA10201-DPB13401 DPA10201-DPB15501 DPA10202-DPB10101 DPA10202-DPB10201 DPA10202-DPB10202 DPA10202-DPB10401 DPA10202-DPB10501 DPA10202-DPB110601 DPA10202-DPB11101 DPA10202-DPB11301 DPA10202-DPB11801 DPA10202-DPB11901 DPA10202-DPB13101 DPA10202-DPB13801; note = HLAs: DPA10202-DPB15501 DPA10202-DPB16501 DPA10301-DPB10101 DPA10301-DPB10201 DPA10301-DPB10202 DPA10301-DPB10401 DPA10301-DPB10402 DPA10301-DPB110501 DPA10301-DPB110601 DPA10301-DPB11301 DPA10301-DPB11801 DPA10301-DPB12301 DPA10301-DPB13901 DPA10301-DPB14001 DPA10301-DPB14901 DPA10301-DPB15501 DPA10301-DPB16501 DPA10301-DPB17501 DPA10301-DPB18001 DPA10401-DPB10101 DPA10401-DPB10201 DPA10401-DPB10202 DPA10401-DPB10402 DPA10401-DPB10501 DPA10401-DPB110501 DPA10401-DPB14901
KEPPLLWHGFELFPDKWTVQ

SEQ ID NO: 6722 - protein, 14 aa, synthetic construct
  source 1..14: note = Seed: PPFLWMGYELHPDK; note = HLAs: DRB1_1001 DPA10103-DPB10101 DPA10103-DPB10201 DPA10103-DPB10202 DPA10103-DPB10401 DPA10103-DPB112601 DPA10103-DPB11501 DPA10103-DPB11601 DPA10103-DPB11901 DPA10103-DPB12301 DPA10103-DPB13101 DPA10103-DPB13401 DPA10103-DPB13901 DPA10103-DPB14001 DPA10103-DPB14101 DPA10103-DPB14801 DPA10103-DPB15001 DPA10103-DPB15901 DPA10104-DPB10101 DPA10104-DPB11501 DPA10105-DPB10101 DPA10105-DPB10401 DPA10105-DPB15001 DPA10106-DPB10101 DPA10201-DPB10101 DPA10201-DPB110601 DPA10201-DPB11501 DPA10201-DPB11601 DPA10201-DPB11901 DPA10202-DPB10101 DPA10202-DPB10201 DPA10202-DPB10202 DPA10202-DPB10401 DPA10202-DPB110601 DPA10202-DPB11901 DPA10202-DPB13101 DPA10202-DPB16501 DPA10301-DPB10101 DPA10301-DPB10201 DPA10301-DPB10202 DPA10301-DPB10401 DPA10301-DPB10402 DPA10301-DPB110501 DPA10301-DPB110601 DPA10301-DPB11801 DPA10301-DPB12301 DPA10301-DPB13901 DPA10301-DPB14001 DPA10301-DPB14901 DPA10301-DPB15501 DPA10301-DPB16501 DPA10301-DPB17501 DPA10301-DPB18001 DPA10401-DPB10101 DPA10401-DPB10201; note = HLAs: DPA10401-DPB10202 DPA10401-DPB10402 DPA10401-DPB10501 DPA10401-DPB110501 DPA10401-DPB14901
PPWLWLGFELLPDK

SEQ ID NO: 6723 - protein, 20 aa, synthetic construct
  source 1..20: note = Seed: KEPPFLWMGYELHPDKWTVQ; note = HLAs: DPA10103-DPB10101 DPA10103-DPB10201 DPA10103-DPB10202 DPA10103-DPB10401 DPA10103-DPB10402 DPA10103-DPB10501 DPA10103-DPB110501 DPA10103-DPB112601 DPA10103-DPB11501 DPA10103-DPB11601 DPA10103-DPB11801 DPA10103-DPB11901 DPA10103-DPB12301 DPA10103-DPB13101 DPA10103-DPB13401 DPA10103-DPB13901 DPA10103-DPB14001 DPA10103-DPB14101 DPA10103-DPB14801 DPA10103-DPB14901 DPA10103-DPB15001 DPA10103-DPB15101 DPA10103-DPB15501 DPA10103-DPB15901 DPA10103-DPB18001 DPA10104-DPB10101 DPA10104-DPB11501 DPA10105-DPB10101 DPA10105-DPB10401 DPA10105-DPB11801 DPA10105-DPB15001 DPA10106-DPB10101 DPA10201-DPB10101 DPA10201-DPB10201 DPA10201-DPB10202 DPA10201-DPB10401 DPA10201-DPB10501 DPA10201-DPB110601 DPA10201-DPB11501 DPA10201-DPB11601 DPA10201-DPB11901 DPA10201-DPB13401 DPA10201-DPB15501 DPA10202-DPB10101 DPA10202-DPB10201 DPA10202-DPB10202 DPA10202-DPB10401 DPA10202-DPB10501 DPA10202-DPB110601 DPA10202-DPB11101 DPA10202-DPB11301 DPA10202-DPB11801 DPA10202-DPB11901 DPA10202-DPB13101 DPA10202-DPB13801; note = HLAs: DPA10202-DPB15501 DPA10202-DPB16501 DPA10301-DPB10101 DPA10301-DPB10201 DPA10301-DPB10202 DPA10301-DPB10401 DPA10301-DPB10402 DPA10301-DPB110501 DPA10301-DPB110601 DPA10301-DPB11101 DPA10301-DPB11301 DPA10301-DPB11801 DPA10301-DPB12301 DPA10301-DPB13901 DPA10301-DPB14001 DPA10301-DPB14901 DPA10301-DPB15501 DPA10301-DPB16501 DPA10301-DPB17501 DPA10301-DPB18001 DPA10401-DPB10101 DPA10401-DPB10201 DPA10401-DPB10202 DPA10401-DPB10402 DPA10401-DPB10501 DPA10401-DPB110501 DPA10401-DPB14901
KEPPILWHGFELMPDKWTVQ

SEQ ID NO: 6724 - protein, 14 aa, synthetic construct
  source 1..14: note = Seed: PPFLWMGYELHPDK; note = HLAs: DPA10103-DPB10101 DPA10103-DPB10201 DPA10103-DPB10202 DPA10103-DPB10401 DPA10103-DPB112601 DPA10103-DPB11501 DPA10103-DPB11601 DPA10103-DPB11901 DPA10103-DPB12301 DPA10103-DPB13101 DPA10103-DPB13401 DPA10103-DPB13901 DPA10103-DPB14001 DPA10103-DPB14101 DPA10103-DPB14801 DPA10103-DPB15001 DPA10103-DPB15901 DPA10104-DPB10101 DPA10104-DPB11501 DPA10105-DPB10101 DPA10105-DPB10401 DPA10105-DPB15001 DPA10106-DPB10101 DPA10201-DPB10101 DPA10201-DPB110601 DPA10201-DPB11501 DPA10201-DPB11601 DPA10201-DPB11901 DPA10202-DPB10101 DPA10202-DPB10201 DPA10202-DPB10202 DPA10202-DPB10401 DPA10202-DPB110601 DPA10202-DPB11901 DPA10202-DPB13101 DPA10202-DPB16501 DPA10301-DPB10101 DPA10301-DPB10201 DPA10301-DPB10202 DPA10301-DPB10401 DPA10301-DPB10402 DPA10301-DPB110501 DPA10301-DPB110601 DPA10301-DPB11801 DPA10301-DPB12301 DPA10301-DPB13901 DPA10301-DPB14001 DPA10301-DPB14901 DPA10301-DPB15501 DPA10301-DPB16501 DPA10301-DPB17501 DPA10301-DPB18001 DPA10401-DPB10101 DPA10401-DPB10201; note = HLAs: DPA10401-DPB10202 DPA10401-DPB10402 DPA10401-DPB10501 DPA10401-DPB110501 DPA10401-DPB14901
PPFLWHGIELIPDK

SEQ ID NO: 6725 - protein, 14 aa, synthetic construct
  source 1..14: note = Seed: PPFLWMGYELHPDK; note = HLAs: DPA10103-DPB10101 DPA10103-DPB10201 DPA10103-DPB10202 DPA10103-DPB10401 DPA10103-DPB112601 DPA10103-DPB11501 DPA10103-DPB11601 DPA10103-DPB11901 DPA10103-DPB12301 DPA10103-DPB13101 DPA10103-DPB13401 DPA10103-DPB13901 DPA10103-DPB14001 DPA10103-DPB14101 DPA10103-DPB14801 DPA10103-DPB15001 DPA10103-DPB15901 DPA10104-DPB10101 DPA10104-DPB11501 DPA10105-DPB10101 DPA10105-DPB10401 DPA10105-DPB15001 DPA10106-DPB10101 DPA10201-DPB10101 DPA10201-DPB110601 DPA10201-DPB11501 DPA10201-DPB11601 DPA10201-DPB11901 DPA10202-DPB10101 DPA10202-DPB10201 DPA10202-DPB10202 DPA10202-DPB10401 DPA10202-DPB110601 DPA10202-DPB11901 DPA10202-DPB13101 DPA10202-DPB16501 DPA10301-DPB10101 DPA10301-DPB10201 DPA10301-DPB10202 DPA10301-DPB10401 DPA10301-DPB10402 DPA10301-DPB110501 DPA10301-DPB110601 DPA10301-DPB11801 DPA10301-DPB12301 DPA10301-DPB13901 DPA10301-DPB14001 DPA10301-DPB14901 DPA10301-DPB15501 DPA10301-DPB16501 DPA10301-DPB17501 DPA10301-DPB18001 DPA10401-DPB10101 DPA10401-DPB10201; note = HLAs: DPA10401-DPB10202 DPA10401-DPB10402 DPA10401-DPB10501 DPA10401-DPB110501 DPA10401-DPB14901
PPILWEGFELFPDK

SEQ ID NO: 6726 - protein, 20 aa, synthetic construct
  source 1..20: note = Seed: KEPPFLWMGYELHPDKWTVQ; note = HLAs: DRB1_0101 DPA10103-DPB10101 DPA10103-DPB10201 DPA10103-DPB10202 DPA10103-DPB10401 DPA10103-DPB10402 DPA10103-DPB10501 DPA10103-DPB110501 DPA10103-DPB112601 DPA10103-DPB11501 DPA10103-DPB11601 DPA10103-DPB11801 DPA10103-DPB11901 DPA10103-DPB12301 DPA10103-DPB13101 DPA10103-DPB13401 DPA10103-DPB13901 DPA10103-DPB14001 DPA10103-DPB14101 DPA10103-DPB14801 DPA10103-DPB14901 DPA10103-DPB15001 DPA10103-DPB15101 DPA10103-DPB15501 DPA10103-DPB15901 DPA10103-DPB18001 DPA10104-DPB10101 DPA10104-DPB11501 DPA10105-DPB10101 DPA10105-DPB10401 DPA10105-DPB11801 DPA10105-DPB15001 DPA10106-DPB10101 DPA10201-DPB10101 DPA10201-DPB10201 DPA10201-DPB10202 DPA10201-DPB10401 DPA10201-DPB10501 DPA10201-DPB110601 DPA10201-DPB11501 DPA10201-DPB11601 DPA10201-DPB11901 DPA10201-DPB13401 DPA10201-DPB15501 DPA10202-DPB10101 DPA10202-DPB10201 DPA10202-DPB10202 DPA10202-DPB10401 DPA10202-DPB10501 DPA10202-DPB110601 DPA10202-DPB11101 DPA10202-DPB11301 DPA10202-DPB11801 DPA10202-DPB11901 DPA10202-DPB13101; note = HLAs: DPA10202-DPB13801 DPA10202-DPB15501 DPA10202-DPB16501 DPA10301-DPB10101 DPA10301-DPB10201 DPA10301-DPB10202 DPA10301-DPB10401 DPA10301-DPB10402 DPA10301-DPB110501 DPA10301-DPB110601 DPA10301-DPB11101 DPA10301-DPB11301 DPA10301-DPB11801 DPA10301-DPB12301 DPA10301-DPB13901 DPA10301-DPB14001 DPA10301-DPB14901 DPA10301-DPB15501 DPA10301-DPB16501 DPA10301-DPB17501 DPA10301-DPB18001 DPA10401-DPB10101 DPA10401-DPB10201 DPA10401-DPB10202 DPA10401-DPB10402 DPA10401-DPB10501 DPA10401-DPB110501 DPA10401-DPB14901
KEPPFLWAGFELRPDKWTVQ

SEQ ID NO: 6727 - protein, 14 aa, synthetic construct
  source 1..14: note = Seed: PPFLWMGYELHPDK; note = HLAs: DPA10103-DPB10101 DPA10103-DPB10201 DPA10103-DPB10202 DPA10103-DPB10401 DPA10103-DPB112601 DPA10103-DPB11501 DPA10103-DPB11601 DPA10103-DPB11901 DPA10103-DPB12301 DPA10103-DPB13101 DPA10103-DPB13401 DPA10103-DPB13901 DPA10103-DPB14001 DPA10103-DPB14101 DPA10103-DPB14801 DPA10103-DPB15001 DPA10103-DPB15901 DPA10104-DPB10101 DPA10104-DPB11501 DPA10105-DPB10101 DPA10105-DPB10401 DPA10105-DPB15001 DPA10106-DPB10101 DPA10201-DPB10101 DPA10201-DPB110601 DPA10201-DPB11501 DPA10201-DPB11601 DPA10201-DPB11901 DPA10202-DPB10101 DPA10202-DPB10201 DPA10202-DPB10202 DPA10202-DPB10401 DPA10202-DPB110601 DPA10202-DPB11901 DPA10202-DPB13101 DPA10202-DPB16501 DPA10301-DPB10101 DPA10301-DPB10201 DPA10301-DPB10202 DPA10301-DPB10401 DPA10301-DPB10402 DPA10301-DPB110501 DPA10301-DPB110601 DPA10301-DPB11801 DPA10301-DPB12301 DPA10301-DPB13901 DPA10301-DPB14001 DPA10301-DPB14901 DPA10301-DPB15501 DPA10301-DPB16501 DPA10301-DPB17501 DPA10301-DPB18001 DPA10401-DPB10101 DPA10401-DPB10201; note = HLAs: DPA10401-DPB10202 DPA10401-DPB10402 DPA10401-DPB10501 DPA10401-DPB110501 DPA10401-DPB14901
PPFLWCGFELFPDK

SEQ ID NO: 6728 - protein, 20 aa, synthetic construct
  source 1..20: note = Seed: KEPPFLWMGYELHPDKWTVQ; note = HLAs: DRB1_0101 DRB1_1001 DPA10103-DPB10101 DPA10103-DPB10201 DPA10103-DPB10202 DPA10103-DPB10401 DPA10103-DPB10402 DPA10103-DPB10501 DPA10103-DPB110501 DPA10103-DPB112601 DPA10103-DPB11501 DPA10103-DPB11601 DPA10103-DPB11801 DPA10103-DPB11901 DPA10103-DPB12301 DPA10103-DPB13101 DPA10103-DPB13401 DPA10103-DPB13901 DPA10103-DPB14001 DPA10103-DPB14101 DPA10103-DPB14801 DPA10103-DPB14901 DPA10103-DPB15001 DPA10103-DPB15101 DPA10103-DPB15501 DPA10103-DPB15901 DPA10103-DPB18001 DPA10104-DPB10101 DPA10104-DPB11501 DPA10105-DPB10101 DPA10105-DPB10401 DPA10105-DPB11801 DPA10105-DPB15001 DPA10106-DPB10101 DPA10201-DPB10101 DPA10201-DPB10201 DPA10201-DPB10202 DPA10201-DPB10401 DPA10201-DPB10501 DPA10201-DPB110601 DPA10201-DPB11501 DPA10201-DPB11601 DPA10201-DPB11901 DPA10201-DPB13401 DPA10201-DPB15501 DPA10202-DPB10101 DPA10202-DPB10201 DPA10202-DPB10202 DPA10202-DPB10401 DPA10202-DPB10501 DPA10202-DPB110601 DPA10202-DPB11101 DPA10202-DPB11301 DPA10202-DPB11801 DPA10202-DPB11901; note = HLAs: DPA10202-DPB13101 DPA10202-DPB13801 DPA10202-DPB15501 DPA10202-DPB16501 DPA10301-DPB10101 DPA10301-DPB10201 DPA10301-DPB10202 DPA10301-DPB10401 DPA10301-DPB10402 DPA10301-DPB110501 DPA10301-DPB110601 DPA10301-DPB11101 DPA10301-DPB11301 DPA10301-DPB11801 DPA10301-DPB12301 DPA10301-DPB13901 DPA10301-DPB14001 DPA10301-DPB14901 DPA10301-DPB15501 DPA10301-DPB16501 DPA10301-DPB17501 DPA10301-DPB18001 DPA10401-DPB10101 DPA10401-DPB10201 DPA10401-DPB10202 DPA10401-DPB10402 DPA10401-DPB10501 DPA10401-DPB110501 DPA10401-DPB14901
KEPPFLWNGYELVPDKWTVQ

SEQ ID NO: 6729 - protein, 14 aa, synthetic construct
  source 1..14: note = Seed: PPFLWMGYELHPDK; note = HLAs: DPA10103-DPB10101 DPA10103-DPB10201 DPA10103-DPB10202 DPA10103-DPB10401 DPA10103-DPB112601 DPA10103-DPB11501 DPA10103-DPB11601 DPA10103-DPB11901 DPA10103-DPB12301 DPA10103-DPB13101 DPA10103-DPB13401 DPA10103-DPB13901 DPA10103-DPB14001 DPA10103-DPB14101 DPA10103-DPB14801 DPA10103-DPB15001 DPA10103-DPB15901 DPA10104-DPB10101 DPA10104-DPB11501 DPA10105-DPB10101 DPA10105-DPB10401 DPA10105-DPB15001 DPA10106-DPB10101 DPA10201-DPB10101 DPA10201-DPB110601 DPA10201-DPB11501 DPA10201-DPB11601 DPA10201-DPB11901 DPA10202-DPB10101 DPA10202-DPB10201 DPA10202-DPB10202 DPA10202-DPB10401 DPA10202-DPB110601 DPA10202-DPB11901 DPA10202-DPB13101 DPA10202-DPB16501 DPA10301-DPB10101 DPA10301-DPB10201 DPA10301-DPB10202 DPA10301-DPB10401 DPA10301-DPB10402 DPA10301-DPB110501 DPA10301-DPB110601 DPA10301-DPB11801 DPA10301-DPB12301 DPA10301-DPB13901 DPA10301-DPB14001 DPA10301-DPB14901 DPA10301-DPB15501 DPA10301-DPB16501 DPA10301-DPB17501 DPA10301-DPB18001 DPA10401-DPB10101 DPA10401-DPB10201; note = HLAs: DPA10401-DPB10202 DPA10401-DPB10402 DPA10401-DPB10501 DPA10401-DPB110501 DPA10401-DPB14901
PPFLWDGFELAPDK

SEQ ID NO: 6730 - protein, 20 aa, synthetic construct
  source 1..20: note = Seed: KEPPFLWMGYELHPDKWTVQ; note = HLAs: DRB1_0101 DPA10103-DPB10101 DPA10103-DPB10201 DPA10103-DPB10202 DPA10103-DPB10401 DPA10103-DPB10402 DPA10103-DPB10501 DPA10103-DPB110501 DPA10103-DPB112601 DPA10103-DPB11501 DPA10103-DPB11601 DPA10103-DPB11801 DPA10103-DPB11901 DPA10103-DPB12301 DPA10103-DPB13101 DPA10103-DPB13401 DPA10103-DPB13901 DPA10103-DPB14001 DPA10103-DPB14101 DPA10103-DPB14801 DPA10103-DPB14901 DPA10103-DPB15001 DPA10103-DPB15101 DPA10103-DPB15501 DPA10103-DPB15901 DPA10103-DPB18001 DPA10104-DPB10101 DPA10104-DPB11501 DPA10105-DPB10101 DPA10105-DPB10401 DPA10105-DPB11801 DPA10105-DPB15001 DPA10106-DPB10101 DPA10201-DPB10101 DPA10201-DPB10201 DPA10201-DPB10202 DPA10201-DPB10401 DPA10201-DPB10501 DPA10201-DPB110601 DPA10201-DPB11501 DPA10201-DPB11601 DPA10201-DPB11901 DPA10201-DPB13401 DPA10201-DPB15501 DPA10202-DPB10101 DPA10202-DPB10201 DPA10202-DPB10202 DPA10202-DPB10401 DPA10202-DPB10501 DPA10202-DPB110601 DPA10202-DPB11101 DPA10202-DPB11301 DPA10202-DPB11801 DPA10202-DPB11901 DPA10202-DPB13101; note = HLAs: DPA10202-DPB13801 DPA10202-DPB15501 DPA10202-DPB16501 DPA10301-DPB10101 DPA10301-DPB10201 DPA10301-DPB10202 DPA10301-DPB10401 DPA10301-DPB10402 DPA10301-DPB110501 DPA10301-DPB110601 DPA10301-DPB11301 DPA10301-DPB11801 DPA10301-DPB12301 DPA10301-DPB13901 DPA10301-DPB14001 DPA10301-DPB14901 DPA10301-DPB15501 DPA10301-DPB16501 DPA10301-DPB17501 DPA10301-DPB18001 DPA10401-DPB10101 DPA10401-DPB10201 DPA10401-DPB10202 DPA10401-DPB10402 DPA10401-DPB10501 DPA10401-DPB110501 DPA10401-DPB14901
KEPPFLWQGWELLPDKWTVQ

SEQ ID NO: 6731 - protein, 14 aa, synthetic construct
  source 1..14: note = Seed: PPFLWMGYELHPDK; note = HLAs: DRB1_1001 DPA10103-DPB10201 DPA10103-DPB10202 DPA10103-DPB10401 DPA10103-DPB112601 DPA10103-DPB11501 DPA10103-DPB11601 DPA10103-DPB11901 DPA10103-DPB12301 DPA10103-DPB13401 DPA10103-DPB13901 DPA10103-DPB14001 DPA10103-DPB14101 DPA10103-DPB14801 DPA10103-DPB15901 DPA10104-DPB11501 DPA10105-DPB10401 DPA10106-DPB10101 DPA10201-DPB10101 DPA10201-DPB110601 DPA10201-DPB11501 DPA10201-DPB11601 DPA10201-DPB11901 DPA10202-DPB10101 DPA10202-DPB10201 DPA10202-DPB10202 DPA10202-DPB10401 DPA10202-DPB110601 DPA10202-DPB11901 DPA10202-DPB13101 DPA10202-DPB16501 DPA10301-DPB10101 DPA10301-DPB10201 DPA10301-DPB10202 DPA10301-DPB10401 DPA10301-DPB10402 DPA10301-DPB110501 DPA10301-DPB110601 DPA10301-DPB11801 DPA10301-DPB12301 DPA10301-DPB13901 DPA10301-DPB14001 DPA10301-DPB14901 DPA10301-DPB15501 DPA10301-DPB17501 DPA10301-DPB18001 DPA10401-DPB10201 DPA10401-DPB10202 DPA10401-DPB10402 DPA10401-DPB10501 DPA10401-DPB110501 DPA10401-DPB14901
PPFLWMGIELLPDK

SEQ ID NO: 6732 - protein, 14 aa, synthetic construct
  source 1..14: note = Seed: PPFLWMGYELHPDK; note = HLAs: DRB1_1001 DPA10103-DPB10101 DPA10103-DPB10201 DPA10103-DPB10202 DPA10103-DPB10401 DPA10103-DPB112601 DPA10103-DPB11501 DPA10103-DPB11601 DPA10103-DPB11901 DPA10103-DPB12301 DPA10103-DPB13101 DPA10103-DPB13401 DPA10103-DPB13901 DPA10103-DPB14001 DPA10103-DPB14101 DPA10103-DPB14801 DPA10103-DPB15001 DPA10103-DPB15901 DPA10104-DPB10101 DPA10104-DPB11501 DPA10105-DPB10101 DPA10105-DPB10401 DPA10105-DPB15001 DPA10106-DPB10101 DPA10201-DPB10101 DPA10201-DPB110601 DPA10201-DPB11501 DPA10201-DPB11601 DPA10201-DPB11901 DPA10202-DPB10101 DPA10202-DPB10201 DPA10202-DPB10202 DPA10202-DPB10401 DPA10202-DPB110601 DPA10202-DPB11901 DPA10202-DPB13101 DPA10202-DPB16501 DPA10301-DPB10101 DPA10301-DPB10201 DPA10301-DPB10202 DPA10301-DPB10401 DPA10301-DPB10402 DPA10301-DPB110501 DPA10301-DPB110601 DPA10301-DPB11801 DPA10301-DPB12301 DPA10301-DPB13901 DPA10301-DPB14001 DPA10301-DPB14901 DPA10301-DPB15501 DPA10301-DPB16501 DPA10301-DPB17501 DPA10301-DPB18001 DPA10401-DPB10101 DPA10401-DPB10201; note = HLAs: DPA10401-DPB10202 DPA10401-DPB10402 DPA10401-DPB10501 DPA10401-DPB110501 DPA10401-DPB14901
PPFLWIGLELVPDK

SEQ ID NO: 6733 - protein, 14 aa, synthetic construct
  source 1..14: note = Seed: PPFLWMGYELHPDK; note = HLAs: DRB1_1001 DPA10103-DPB10101 DPA10103-DPB10201 DPA10103-DPB10202 DPA10103-DPB10401 DPA10103-DPB112601 DPA10103-DPB11501 DPA10103-DPB11601 DPA10103-DPB11901 DPA10103-DPB12301 DPA10103-DPB13101 DPA10103-DPB13401 DPA10103-DPB13901 DPA10103-DPB14001 DPA10103-DPB14101 DPA10103-DPB14801 DPA10103-DPB15001 DPA10103-DPB15901 DPA10104-DPB10101 DPA10104-DPB11501 DPA10105-DPB10101 DPA10105-DPB10401 DPA10105-DPB15001 DPA10106-DPB10101 DPA10201-DPB10101 DPA10201-DPB110601 DPA10201-DPB11501 DPA10201-DPB11601 DPA10201-DPB11901 DPA10202-DPB10101 DPA10202-DPB10201 DPA10202-DPB10202 DPA10202-DPB10401 DPA10202-DPB110601 DPA10202-DPB11901 DPA10202-DPB13101 DPA10202-DPB16501 DPA10301-DPB10101 DPA10301-DPB10201 DPA10301-DPB10202 DPA10301-DPB10401 DPA10301-DPB10402 DPA10301-DPB110501 DPA10301-DPB110601 DPA10301-DPB11801 DPA10301-DPB12301 DPA10301-DPB13901 DPA10301-DPB14001 DPA10301-DPB14901 DPA10301-DPB15501 DPA10301-DPB16501 DPA10301-DPB17501 DPA10301-DPB18001 DPA10401-DPB10101 DPA10401-DPB10201; note = HLAs: DPA10401-DPB10202 DPA10401-DPB10402 DPA10401-DPB10501 DPA10401-DPB110501 DPA10401-DPB14901
PPYLWLGFELMPDK

SEQ ID NO: 6734 - protein, 14 aa, synthetic construct
  source 1..14: note = Seed: PPFLWMGYELHPDK; note = HLAs: DPA10103-DPB10101 DPA10103-DPB10201 DPA10103-DPB10202 DPA10103-DPB10401 DPA10103-DPB112601 DPA10103-DPB11501 DPA10103-DPB11601 DPA10103-DPB11901 DPA10103-DPB12301 DPA10103-DPB13101 DPA10103-DPB13401 DPA10103-DPB13901 DPA10103-DPB14001 DPA10103-DPB14101 DPA10103-DPB14801 DPA10103-DPB15001 DPA10103-DPB15901 DPA10104-DPB10101 DPA10104-DPB11501 DPA10105-DPB10101 DPA10105-DPB10401 DPA10105-DPB15001 DPA10106-DPB10101 DPA10201-DPB10101 DPA10201-DPB110601 DPA10201-DPB11501 DPA10201-DPB11601 DPA10201-DPB11901 DPA10202-DPB10101 DPA10202-DPB10201 DPA10202-DPB10202 DPA10202-DPB10401 DPA10202-DPB110601 DPA10202-DPB11901 DPA10202-DPB13101 DPA10202-DPB16501 DPA10301-DPB10101 DPA10301-DPB10201 DPA10301-DPB10202 DPA10301-DPB10401 DPA10301-DPB10402 DPA10301-DPB110501 DPA10301-DPB110601 DPA10301-DPB11801 DPA10301-DPB12301 DPA10301-DPB13901 DPA10301-DPB14001 DPA10301-DPB14901 DPA10301-DPB16501 DPA10301-DPB17501 DPA10301-DPB18001 DPA10401-DPB10101 DPA10401-DPB10201 DPA10401-DPB10202; note = HLAs: DPA10401-DPB10402 DPA10401-DPB10501 DPA10401-DPB110501 DPA10401-DPB14901
PPMLWLGFELLPDK

SEQ ID NO: 6735 - protein, 20 aa, synthetic construct
  source 1..20: note = Seed: KEPPFLWMGYELHPDKWTVQ; note = HLAs: DRB1_1001 DPA10103-DPB10101 DPA10103-DPB10201 DPA10103-DPB10202 DPA10103-DPB10401 DPA10103-DPB10402 DPA10103-DPB10501 DPA10103-DPB110501 DPA10103-DPB112601 DPA10103-DPB11501 DPA10103-DPB11601 DPA10103-DPB11801 DPA10103-DPB11901 DPA10103-DPB12301 DPA10103-DPB13101 DPA10103-DPB13401 DPA10103-DPB13901 DPA10103-DPB14001 DPA10103-DPB14101 DPA10103-DPB14801 DPA10103-DPB14901 DPA10103-DPB15001 DPA10103-DPB15101 DPA10103-DPB15501 DPA10103-DPB15901 DPA10103-DPB18001 DPA10104-DPB10101 DPA10104-DPB11501 DPA10105-DPB10101 DPA10105-DPB10401 DPA10105-DPB11801 DPA10105-DPB15001 DPA10106-DPB10101 DPA10201-DPB10101 DPA10201-DPB10201 DPA10201-DPB10202 DPA10201-DPB10401 DPA10201-DPB10501 DPA10201-DPB110601 DPA10201-DPB11501 DPA10201-DPB11601 DPA10201-DPB11901 DPA10201-DPB13401 DPA10201-DPB15501 DPA10202-DPB10101 DPA10202-DPB10201 DPA10202-DPB10202 DPA10202-DPB10401 DPA10202-DPB10501 DPA10202-DPB110601 DPA10202-DPB11101 DPA10202-DPB11301 DPA10202-DPB11801 DPA10202-DPB11901 DPA10202-DPB13101; note = HLAs: DPA10202-DPB13801 DPA10202-DPB15501 DPA10202-DPB16501 DPA10301-DPB10101 DPA10301-DPB10201 DPA10301-DPB10202 DPA10301-DPB10401 DPA10301-DPB10402 DPA10301-DPB110501 DPA10301-DPB110601 DPA10301-DPB11101 DPA10301-DPB11301 DPA10301-DPB11801 DPA10301-DPB12301 DPA10301-DPB13901 DPA10301-DPB14001 DPA10301-DPB14901 DPA10301-DPB15501 DPA10301-DPB16501 DPA10301-DPB17501 DPA10301-DPB18001 DPA10401-DPB10101 DPA10401-DPB10201 DPA10401-DPB10202 DPA10401-DPB10402 DPA10401-DPB10501 DPA10401-DPB110501 DPA10401-DPB14901
KEPPFLWNGFELNPDKWTVQ

SEQ ID NO: 6736 - protein, 20 aa, synthetic construct
  source 1..20: note = Seed: KEPPFLWMGYELHPDKWTVQ; note = HLAs: DPA10103-DPB10101 DPA10103-DPB10201 DPA10103-DPB10202 DPA10103-DPB10401 DPA10103-DPB10402 DPA10103-DPB10501 DPA10103-DPB110501 DPA10103-DPB112601 DPA10103-DPB11501 DPA10103-DPB11601 DPA10103-DPB11801 DPA10103-DPB11901 DPA10103-DPB12301 DPA10103-DPB13101 DPA10103-DPB13401 DPA10103-DPB13901 DPA10103-DPB14001 DPA10103-DPB14101 DPA10103-DPB14801 DPA10103-DPB14901 DPA10103-DPB15001 DPA10103-DPB15101 DPA10103-DPB15501 DPA10103-DPB15901 DPA10103-DPB18001 DPA10104-DPB10101 DPA10104-DPB11501 DPA10105-DPB10101 DPA10105-DPB10401 DPA10105-DPB11801 DPA10105-DPB15001 DPA10106-DPB10101 DPA10201-DPB10101 DPA10201-DPB10201 DPA10201-DPB10202 DPA10201-DPB10401 DPA10201-DPB10501 DPA10201-DPB110601 DPA10201-DPB11501 DPA10201-DPB11601 DPA10201-DPB11901 DPA10201-DPB13401 DPA10201-DPB15501 DPA10202-DPB10101 DPA10202-DPB10201 DPA10202-DPB10202 DPA10202-DPB10401 DPA10202-DPB10501 DPA10202-DPB110601 DPA10202-DPB11101 DPA10202-DPB11301 DPA10202-DPB11801 DPA10202-DPB11901 DPA10202-DPB13101 DPA10202-DPB13801; note = HLAs: DPA10202-DPB15501 DPA10202-DPB16501 DPA10301-DPB10101 DPA10301-DPB10201 DPA10301-DPB10202 DPA10301-DPB10401 DPA10301-DPB10402 DPA10301-DPB110501 DPA10301-DPB110601 DPA10301-DPB11101 DPA10301-DPB11301 DPA10301-DPB11801 DPA10301-DPB12301 DPA10301-DPB13901 DPA10301-DPB14001 DPA10301-DPB14901 DPA10301-DPB15501 DPA10301-DPB16501 DPA10301-DPB17501 DPA10301-DPB18001 DPA10401-DPB10101 DPA10401-DPB10201 DPA10401-DPB10202 DPA10401-DPB10402 DPA10401-DPB10501 DPA10401-DPB110501 DPA10401-DPB14901
KEPPYLWQGFELMPDKWTVQ

SEQ ID NO: 6737 - protein, 14 aa, synthetic construct
  source 1..14: note = Seed: PPFLWMGYELHPDK; note = HLAs: DPA10103-DPB10101 DPA10103-DPB10201 DPA10103-DPB10202 DPA10103-DPB10401 DPA10103-DPB112601 DPA10103-DPB11501 DPA10103-DPB11601 DPA10103-DPB11901 DPA10103-DPB12301 DPA10103-DPB13101 DPA10103-DPB13401 DPA10103-DPB13901 DPA10103-DPB14001 DPA10103-DPB14101 DPA10103-DPB14801 DPA10103-DPB15001 DPA10103-DPB15901 DPA10104-DPB10101 DPA10104-DPB11501 DPA10105-DPB10101 DPA10105-DPB10401 DPA10105-DPB15001 DPA10106-DPB10101 DPA10201-DPB10101 DPA10201-DPB110601 DPA10201-DPB11501 DPA10201-DPB11601 DPA10201-DPB11901 DPA10202-DPB10101 DPA10202-DPB10201 DPA10202-DPB10202 DPA10202-DPB10401 DPA10202-DPB110601 DPA10202-DPB11901 DPA10202-DPB13101 DPA10202-DPB16501 DPA10301-DPB10101 DPA10301-DPB10201 DPA10301-DPB10202 DPA10301-DPB10401 DPA10301-DPB10402 DPA10301-DPB110501 DPA10301-DPB110601 DPA10301-DPB11801 DPA10301-DPB12301 DPA10301-DPB13901 DPA10301-DPB14001 DPA10301-DPB14901 DPA10301-DPB15501 DPA10301-DPB16501 DPA10301-DPB17501 DPA10301-DPB18001 DPA10401-DPB10101 DPA10401-DPB10201; note = HLAs: DPA10401-DPB10202 DPA10401-DPB10402 DPA10401-DPB10501 DPA10401-DPB110501 DPA10401-DPB14901
PPFLWEGFELHPDK

SEQ ID NO: 6738 - protein, 20 aa, synthetic construct
  source 1..20: note = Seed: KEPPFLWMGYELHPDKWTVQ; note = HLAs: DPA10103-DPB10101 DPA10103-DPB10201 DPA10103-DPB10202 DPA10103-DPB10401 DPA10103-DPB10402 DPA10103-DPB10501 DPA10103-DPB110501 DPA10103-DPB112601 DPA10103-DPB11501 DPA10103-DPB11601 DPA10103-DPB11801 DPA10103-DPB11901 DPA10103-DPB12301 DPA10103-DPB13101 DPA10103-DPB13401 DPA10103-DPB13901 DPA10103-DPB14001 DPA10103-DPB14101 DPA10103-DPB14801 DPA10103-DPB14901 DPA10103-DPB15001 DPA10103-DPB15101 DPA10103-DPB15501 DPA10103-DPB15901 DPA10103-DPB18001 DPA10104-DPB10101 DPA10104-DPB11501 DPA10105-DPB10101 DPA10105-DPB10401 DPA10105-DPB11801 DPA10105-DPB15001 DPA10106-DPB10101 DPA10201-DPB10101 DPA10201-DPB10201 DPA10201-DPB10202 DPA10201-DPB10401 DPA10201-DPB10501 DPA10201-DPB110601 DPA10201-DPB11501 DPA10201-DPB11601 DPA10201-DPB11901 DPA10201-DPB13401 DPA10201-DPB15501 DPA10202-DPB10101 DPA10202-DPB10201 DPA10202-DPB10202 DPA10202-DPB10401 DPA10202-DPB10501 DPA10202-DPB110601 DPA10202-DPB11101 DPA10202-DPB11301 DPA10202-DPB11801 DPA10202-DPB11901 DPA10202-DPB13101 DPA10202-DPB13801; note = HLAs: DPA10202-DPB15501 DPA10202-DPB16501 DPA10301-DPB10101 DPA10301-DPB10201 DPA10301-DPB10202 DPA10301-DPB10401 DPA10301-DPB10402 DPA10301-DPB110501 DPA10301-DPB110601 DPA10301-DPB11101 DPA10301-DPB11301 DPA10301-DPB11801 DPA10301-DPB12301 DPA10301-DPB13901 DPA10301-DPB14001 DPA10301-DPB14901 DPA10301-DPB15501 DPA10301-DPB16501 DPA10301-DPB17501 DPA10301-DPB18001 DPA10401-DPB10101 DPA10401-DPB10201 DPA10401-DPB10202 DPA10401-DPB10402 DPA10401-DPB10501 DPA10401-DPB110501 DPA10401-DPB14901
KEPPFLWHGFELQPDKWTVQ

SEQ ID NO: 6739 - protein, 20 aa, synthetic construct
  source 1..20: note = Seed: KEPPFLWMGYELHPDKWTVQ; note = HLAs: DRB1_0101 DPA10103-DPB10101 DPA10103-DPB10201 DPA10103-DPB10202 DPA10103-DPB10401 DPA10103-DPB10402 DPA10103-DPB10501 DPA10103-DPB110501 DPA10103-DPB112601 DPA10103-DPB11501 DPA10103-DPB11601 DPA10103-DPB11801 DPA10103-DPB11901 DPA10103-DPB12301 DPA10103-DPB13101 DPA10103-DPB13401 DPA10103-DPB13901 DPA10103-DPB14001 DPA10103-DPB14101 DPA10103-DPB14801 DPA10103-DPB14901 DPA10103-DPB15001 DPA10103-DPB15101 DPA10103-DPB15501 DPA10103-DPB15901 DPA10103-DPB18001 DPA10104-DPB10101 DPA10104-DPB11501 DPA10105-DPB10101 DPA10105-DPB10401 DPA10105-DPB11801 DPA10105-DPB15001 DPA10106-DPB10101 DPA10201-DPB10101 DPA10201-DPB10201 DPA10201-DPB10202 DPA10201-DPB10401 DPA10201-DPB10501 DPA10201-DPB110601 DPA10201-DPB11501 DPA10201-DPB11601 DPA10201-DPB11901 DPA10201-DPB13401 DPA10201-DPB15501 DPA10202-DPB10101 DPA10202-DPB10201 DPA10202-DPB10202 DPA10202-DPB10401 DPA10202-DPB10501 DPA10202-DPB110601 DPA10202-DPB11101 DPA10202-DPB11301 DPA10202-DPB11801 DPA10202-DPB11901 DPA10202-DPB13101; note = HLAs: DPA10202-DPB13801 DPA10202-DPB15501 DPA10202-DPB16501 DPA10301-DPB10101 DPA10301-DPB10201 DPA10301-DPB10202 DPA10301-DPB10401 DPA10301-DPB10402 DPA10301-DPB110501 DPA10301-DPB110601 DPA10301-DPB11101 DPA10301-DPB11301 DPA10301-DPB11801 DPA10301-DPB12301 DPA10301-DPB13901 DPA10301-DPB14001 DPA10301-DPB14901 DPA10301-DPB15501 DPA10301-DPB16501 DPA10301-DPB17501 DPA10301-DPB18001 DPA10401-DPB10101 DPA10401-DPB10201 DPA10401-DPB10202 DPA10401-DPB10402 DPA10401-DPB10501 DPA10401-DPB110501 DPA10401-DPB14901
KEPPYLWIGYELLPDKWTVQ

SEQ ID NO: 6740 - protein, 14 aa, synthetic construct
  source 1..14: note = Seed: PPFLWMGYELHPDK; note = HLAs: DPA10103-DPB10101 DPA10103-DPB10201 DPA10103-DPB10202 DPA10103-DPB10401 DPA10103-DPB112601 DPA10103-DPB11501 DPA10103-DPB11601 DPA10103-DPB11901 DPA10103-DPB12301 DPA10103-DPB13101 DPA10103-DPB13401 DPA10103-DPB13901 DPA10103-DPB14001 DPA10103-DPB14101 DPA10103-DPB14801 DPA10103-DPB15001 DPA10103-DPB15901 DPA10104-DPB10101 DPA10104-DPB11501 DPA10105-DPB10101 DPA10105-DPB10401 DPA10105-DPB15001 DPA10106-DPB10101 DPA10201-DPB10101 DPA10201-DPB110601 DPA10201-DPB11501 DPA10201-DPB11601 DPA10201-DPB11901 DPA10202-DPB10101 DPA10202-DPB10201 DPA10202-DPB10202 DPA10202-DPB10401 DPA10202-DPB110601 DPA10202-DPB11901 DPA10202-DPB13101 DPA10202-DPB16501 DPA10301-DPB10101 DPA10301-DPB10201 DPA10301-DPB10202 DPA10301-DPB10401 DPA10301-DPB10402 DPA10301-DPB110501 DPA10301-DPB110601 DPA10301-DPB11801 DPA10301-DPB12301 DPA10301-DPB13901 DPA10301-DPB14001 DPA10301-DPB14901 DPA10301-DPB16501 DPA10301-DPB17501 DPA10301-DPB18001 DPA10401-DPB10101 DPA10401-DPB10201 DPA10401-DPB10202; note = HLAs: DPA10401-DPB10402 DPA10401-DPB10501 DPA10401-DPB110501 DPA10401-DPB14901
PPLLWIGFELFPDK

SEQ ID NO: 6741 - protein, 14 aa, synthetic construct
  source 1..14: note = Seed: PPFLWMGYELHPDK; note = HLAs: DPA10103-DPB10101 DPA10103-DPB10201 DPA10103-DPB10202 DPA10103-DPB10401 DPA10103-DPB112601 DPA10103-DPB11501 DPA10103-DPB11601 DPA10103-DPB11901 DPA10103-DPB12301 DPA10103-DPB13101 DPA10103-DPB13401 DPA10103-DPB13901 DPA10103-DPB14001 DPA10103-DPB14101 DPA10103-DPB14801 DPA10103-DPB15001 DPA10103-DPB15901 DPA10104-DPB10101 DPA10104-DPB11501 DPA10105-DPB10101 DPA10105-DPB10401 DPA10105-DPB15001 DPA10106-DPB10101 DPA10201-DPB10101 DPA10201-DPB110601 DPA10201-DPB11501 DPA10201-DPB11601 DPA10201-DPB11901 DPA10202-DPB10101 DPA10202-DPB10201 DPA10202-DPB10202 DPA10202-DPB10401 DPA10202-DPB110601 DPA10202-DPB11901 DPA10202-DPB13101 DPA10202-DPB16501 DPA10301-DPB10101 DPA10301-DPB10201 DPA10301-DPB10202 DPA10301-DPB10401 DPA10301-DPB10402 DPA10301-DPB110501 DPA10301-DPB110601 DPA10301-DPB11801 DPA10301-DPB12301 DPA10301-DPB13901 DPA10301-DPB14001 DPA10301-DPB14901 DPA10301-DPB16501 DPA10301-DPB17501 DPA10301-DPB18001 DPA10401-DPB10101 DPA10401-DPB10201 DPA10401-DPB10202; note = HLAs: DPA10401-DPB10402 DPA10401-DPB10501 DPA10401-DPB110501 DPA10401-DPB14901
PPVLWIGFELLPDK

SEQ ID NO: 6742 - protein, 14 aa, synthetic construct
  source 1..14: note = Seed: PPFLWMGYELHPDK; note = HLAs: DRB1_1001 DPA10103-DPB11501 DPA10104-DPB11501 DPA10201-DPB11501 DPA10301-DPB11801 DPA10301-DPB14001
PPVLWLGIELLPDK

SEQ ID NO: 6743 - protein, 14 aa, synthetic construct
  source 1..14: note = Seed: PPFLWMGYELHPDK; note = HLAs: DPA10103-DPB10101 DPA10103-DPB10201 DPA10103-DPB10202 DPA10103-DPB10401 DPA10103-DPB112601 DPA10103-DPB11501 DPA10103-DPB11601 DPA10103-DPB11901 DPA10103-DPB12301 DPA10103-DPB13101 DPA10103-DPB13401 DPA10103-DPB13901 DPA10103-DPB14001 DPA10103-DPB14101 DPA10103-DPB14801 DPA10103-DPB15001 DPA10103-DPB15901 DPA10104-DPB10101 DPA10104-DPB11501 DPA10105-DPB10101 DPA10105-DPB10401 DPA10105-DPB15001 DPA10106-DPB10101 DPA10201-DPB10101 DPA10201-DPB110601 DPA10201-DPB11501 DPA10201-DPB11601 DPA10201-DPB11901 DPA10202-DPB10101 DPA10202-DPB10201 DPA10202-DPB10202 DPA10202-DPB10401 DPA10202-DPB110601 DPA10202-DPB11901 DPA10202-DPB13101 DPA10202-DPB16501 DPA10301-DPB10101 DPA10301-DPB10201 DPA10301-DPB10202 DPA10301-DPB10401 DPA10301-DPB10402 DPA10301-DPB110501 DPA10301-DPB110601 DPA10301-DPB11801 DPA10301-DPB12301 DPA10301-DPB13901 DPA10301-DPB14001 DPA10301-DPB14901 DPA10301-DPB15501 DPA10301-DPB16501 DPA10301-DPB17501 DPA10301-DPB18001 DPA10401-DPB10101 DPA10401-DPB10201; note = HLAs: DPA10401-DPB10202 DPA10401-DPB10402 DPA10401-DPB10501 DPA10401-DPB110501 DPA10401-DPB14901
PPILWIGFELMPDK

SEQ ID NO: 6744 - protein, 14 aa, synthetic construct
  source 1..14: note = Seed: PPFLWMGYELHPDK; note = HLAs: DRB1_1001 DPA10103-DPB10101 DPA10103-DPB10201 DPA10103-DPB10202 DPA10103-DPB10401 DPA10103-DPB112601 DPA10103-DPB11501 DPA10103-DPB11601 DPA10103-DPB11901 DPA10103-DPB12301 DPA10103-DPB13101 DPA10103-DPB13401 DPA10103-DPB13901 DPA10103-DPB14001 DPA10103-DPB14101 DPA10103-DPB14801 DPA10103-DPB15001 DPA10103-DPB15901 DPA10104-DPB10101 DPA10104-DPB11501 DPA10105-DPB10101 DPA10105-DPB10401 DPA10105-DPB15001 DPA10106-DPB10101 DPA10201-DPB10101 DPA10201-DPB110601 DPA10201-DPB11501 DPA10201-DPB11601 DPA10201-DPB11901 DPA10202-DPB10101 DPA10202-DPB10201 DPA10202-DPB10202 DPA10202-DPB10401 DPA10202-DPB110601 DPA10202-DPB11901 DPA10202-DPB13101 DPA10202-DPB16501 DPA10301-DPB10101 DPA10301-DPB10201 DPA10301-DPB10202 DPA10301-DPB10401 DPA10301-DPB10402 DPA10301-DPB110501 DPA10301-DPB110601 DPA10301-DPB11801 DPA10301-DPB12301 DPA10301-DPB13901 DPA10301-DPB14001 DPA10301-DPB14901 DPA10301-DPB15501 DPA10301-DPB16501 DPA10301-DPB17501 DPA10301-DPB18001 DPA10401-DPB10101 DPA10401-DPB10201; note = HLAs: DPA10401-DPB10202 DPA10401-DPB10402 DPA10401-DPB10501 DPA10401-DPB110501 DPA10401-DPB14901
PPFLWMGFELEPDK

SEQ ID NO: 6745 - protein, 14 aa, synthetic construct
  source 1..14: note = Seed: PPFLWMGYELHPDK; note = HLAs: DPA10103-DPB10101 DPA10103-DPB10201 DPA10103-DPB10202 DPA10103-DPB10401 DPA10103-DPB112601 DPA10103-DPB11501 DPA10103-DPB11601 DPA10103-DPB11901 DPA10103-DPB12301 DPA10103-DPB13101 DPA10103-DPB13401 DPA10103-DPB13901 DPA10103-DPB14001 DPA10103-DPB14101 DPA10103-DPB14801 DPA10103-DPB15001 DPA10103-DPB15901 DPA10104-DPB10101 DPA10104-DPB11501 DPA10105-DPB10101 DPA10105-DPB10401 DPA10105-DPB15001 DPA10106-DPB10101 DPA10201-DPB10101 DPA10201-DPB110601 DPA10201-DPB11501 DPA10201-DPB11601 DPA10201-DPB11901 DPA10202-DPB10101 DPA10202-DPB10201 DPA10202-DPB10202 DPA10202-DPB10401 DPA10202-DPB110601 DPA10202-DPB11901 DPA10202-DPB13101 DPA10202-DPB16501 DPA10301-DPB10101 DPA10301-DPB10201 DPA10301-DPB10202 DPA10301-DPB10401 DPA10301-DPB10402 DPA10301-DPB110501 DPA10301-DPB110601 DPA10301-DPB11801 DPA10301-DPB12301 DPA10301-DPB13901 DPA10301-DPB14001 DPA10301-DPB14901 DPA10301-DPB15501 DPA10301-DPB16501 DPA10301-DPB17501 DPA10301-DPB18001 DPA10401-DPB10101 DPA10401-DPB10201; note = HLAs: DPA10401-DPB10202 DPA10401-DPB10402 DPA10401-DPB10501 DPA10401-DPB110501 DPA10401-DPB14901
PPFLWKGFELAPDK

SEQ ID NO: 6746 - protein, 14 aa, synthetic construct
  source 1..14: note = Seed: PPFLWMGYELHPDK; note = HLAs: DPA10103-DPB10101 DPA10103-DPB10201 DPA10103-DPB10202 DPA10103-DPB10401 DPA10103-DPB112601 DPA10103-DPB11501 DPA10103-DPB11601 DPA10103-DPB11901 DPA10103-DPB12301 DPA10103-DPB13101 DPA10103-DPB13401 DPA10103-DPB13901 DPA10103-DPB14001 DPA10103-DPB14101 DPA10103-DPB14801 DPA10103-DPB15001 DPA10103-DPB15901 DPA10104-DPB10101 DPA10104-DPB11501 DPA10105-DPB10101 DPA10105-DPB10401 DPA10105-DPB15001 DPA10106-DPB10101 DPA10201-DPB10101 DPA10201-DPB110601 DPA10201-DPB11501 DPA10201-DPB11601 DPA10201-DPB11901 DPA10202-DPB10101 DPA10202-DPB10201 DPA10202-DPB10202 DPA10202-DPB10401 DPA10202-DPB110601 DPA10202-DPB11901 DPA10202-DPB13101 DPA10202-DPB16501 DPA10301-DPB10101 DPA10301-DPB10201 DPA10301-DPB10202 DPA10301-DPB10401 DPA10301-DPB10402 DPA10301-DPB110501 DPA10301-DPB110601 DPA10301-DPB11801 DPA10301-DPB12301 DPA10301-DPB13901 DPA10301-DPB14001 DPA10301-DPB14901 DPA10301-DPB15501 DPA10301-DPB16501 DPA10301-DPB17501 DPA10301-DPB18001 DPA10401-DPB10101 DPA10401-DPB10201; note = HLAs: DPA10401-DPB10202 DPA10401-DPB10402 DPA10401-DPB10501 DPA10401-DPB110501 DPA10401-DPB14901
PPFLWHGLELFPDK

SEQ ID NO: 6747 - protein, 20 aa, synthetic construct
  source 1..20: note = Seed: KEPPFLWMGYELHPDKWTVQ; note = HLAs: DRB1_0101 DPA10103-DPB10101 DPA10103-DPB10201 DPA10103-DPB10202 DPA10103-DPB10401 DPA10103-DPB10402 DPA10103-DPB10501 DPA10103-DPB110501 DPA10103-DPB112601 DPA10103-DPB11501 DPA10103-DPB11601 DPA10103-DPB11801 DPA10103-DPB11901 DPA10103-DPB12301 DPA10103-DPB13101 DPA10103-DPB13401 DPA10103-DPB13901 DPA10103-DPB14001 DPA10103-DPB14101 DPA10103-DPB14801 DPA10103-DPB14901 DPA10103-DPB15001 DPA10103-DPB15101 DPA10103-DPB15501 DPA10103-DPB15901 DPA10103-DPB18001 DPA10104-DPB10101 DPA10104-DPB11501 DPA10105-DPB10101 DPA10105-DPB10401 DPA10105-DPB11801 DPA10105-DPB15001 DPA10106-DPB10101 DPA10201-DPB10101 DPA10201-DPB10201 DPA10201-DPB10202 DPA10201-DPB10401 DPA10201-DPB10501 DPA10201-DPB110601 DPA10201-DPB11501 DPA10201-DPB11601 DPA10201-DPB11901 DPA10201-DPB13401 DPA10201-DPB15501 DPA10202-DPB10101 DPA10202-DPB10201 DPA10202-DPB10202 DPA10202-DPB10401 DPA10202-DPB10501 DPA10202-DPB110601 DPA10202-DPB11101 DPA10202-DPB11301 DPA10202-DPB11801 DPA10202-DPB11901 DPA10202-DPB13101; note = HLAs: DPA10202-DPB13801 DPA10202-DPB15501 DPA10202-DPB16501 DPA10301-DPB10101 DPA10301-DPB10201 DPA10301-DPB10202 DPA10301-DPB10401 DPA10301-DPB10402 DPA10301-DPB110501 DPA10301-DPB110601 DPA10301-DPB11101 DPA10301-DPB11301 DPA10301-DPB11801 DPA10301-DPB12301 DPA10301-DPB13901 DPA10301-DPB14001 DPA10301-DPB14901 DPA10301-DPB15501 DPA10301-DPB16501 DPA10301-DPB17501 DPA10301-DPB18001 DPA10401-DPB10101 DPA10401-DPB10201 DPA10401-DPB10202 DPA10401-DPB10402 DPA10401-DPB10501 DPA10401-DPB110501 DPA10401-DPB14901
KEPPFLWIGFELRPDKWTVQ

SEQ ID NO: 6748 - protein, 14 aa, synthetic construct
  source 1..14: note = Seed: PPFLWMGYELHPDK; note = HLAs: DPA10103-DPB10101 DPA10103-DPB10201 DPA10103-DPB10202 DPA10103-DPB10401 DPA10103-DPB112601 DPA10103-DPB11501 DPA10103-DPB11601 DPA10103-DPB11901 DPA10103-DPB12301 DPA10103-DPB13101 DPA10103-DPB13401 DPA10103-DPB13901 DPA10103-DPB14001 DPA10103-DPB14101 DPA10103-DPB14801 DPA10103-DPB15001 DPA10103-DPB15901 DPA10104-DPB10101 DPA10104-DPB11501 DPA10105-DPB10101 DPA10105-DPB10401 DPA10105-DPB15001 DPA10106-DPB10101 DPA10201-DPB10101 DPA10201-DPB110601 DPA10201-DPB11501 DPA10201-DPB11601 DPA10201-DPB11901 DPA10202-DPB10101 DPA10202-DPB10201 DPA10202-DPB10202 DPA10202-DPB10401 DPA10202-DPB110601 DPA10202-DPB11901 DPA10202-DPB13101 DPA10202-DPB16501 DPA10301-DPB10101 DPA10301-DPB10201 DPA10301-DPB10202 DPA10301-DPB10401 DPA10301-DPB10402 DPA10301-DPB110501 DPA10301-DPB110601 DPA10301-DPB11801 DPA10301-DPB12301 DPA10301-DPB13901 DPA10301-DPB14001 DPA10301-DPB14901 DPA10301-DPB15501 DPA10301-DPB16501 DPA10301-DPB17501 DPA10301-DPB18001 DPA10401-DPB10101 DPA10401-DPB10201; note = HLAs: DPA10401-DPB10202 DPA10401-DPB10402 DPA10401-DPB10501 DPA10401-DPB110501 DPA10401-DPB14901
PPFLWNGLELLPDK

SEQ ID NO: 6749 - protein, 20 aa, synthetic construct
  source 1..20: note = Seed: KEPPFLWMGYELHPDKWTVQ; note = HLAs: DPA10103-DPB10101 DPA10103-DPB10201 DPA10103-DPB10202 DPA10103-DPB10401 DPA10103-DPB10402 DPA10103-DPB10501 DPA10103-DPB110501 DPA10103-DPB112601 DPA10103-DPB11501 DPA10103-DPB11601 DPA10103-DPB11801 DPA10103-DPB11901 DPA10103-DPB12301 DPA10103-DPB13101 DPA10103-DPB13401 DPA10103-DPB13901 DPA10103-DPB14001 DPA10103-DPB14101 DPA10103-DPB14801 DPA10103-DPB14901 DPA10103-DPB15001 DPA10103-DPB15101 DPA10103-DPB15501 DPA10103-DPB15901 DPA10103-DPB18001 DPA10104-DPB10101 DPA10104-DPB11501 DPA10105-DPB10101 DPA10105-DPB10401 DPA10105-DPB11801 DPA10105-DPB15001 DPA10106-DPB10101 DPA10201-DPB10101 DPA10201-DPB10201 DPA10201-DPB10202 DPA10201-DPB10401 DPA10201-DPB10501 DPA10201-DPB110601 DPA10201-DPB11501 DPA10201-DPB11601 DPA10201-DPB11901 DPA10201-DPB13401 DPA10201-DPB15501 DPA10202-DPB10101 DPA10202-DPB10201 DPA10202-DPB10202 DPA10202-DPB10401 DPA10202-DPB10501 DPA10202-DPB110601 DPA10202-DPB11101 DPA10202-DPB11301 DPA10202-DPB11801 DPA10202-DPB11901 DPA10202-DPB13101 DPA10202-DPB13801; note = HLAs: DPA10202-DPB15501 DPA10202-DPB16501 DPA10301-DPB10101 DPA10301-DPB10201 DPA10301-DPB10202 DPA10301-DPB10401 DPA10301-DPB10402 DPA10301-DPB110501 DPA10301-DPB110601 DPA10301-DPB11101 DPA10301-DPB11301 DPA10301-DPB11801 DPA10301-DPB12301 DPA10301-DPB13901 DPA10301-DPB14001 DPA10301-DPB14901 DPA10301-DPB15501 DPA10301-DPB16501 DPA10301-DPB17501 DPA10301-DPB18001 DPA10401-DPB10101 DPA10401-DPB10201 DPA10401-DPB10202 DPA10401-DPB10402 DPA10401-DPB10501 DPA10401-DPB110501 DPA10401-DPB14901
KEPPFLWKGFELYPDKWTVQ

SEQ ID NO: 6750 - protein, 14 aa, synthetic construct
  source 1..14: note = Seed: PPFLWMGYELHPDK; note = HLAs: DRB1_1001 DPA10103-DPB10201 DPA10103-DPB10202 DPA10103-DPB10401 DPA10103-DPB112601 DPA10103-DPB11501 DPA10103-DPB11601 DPA10103-DPB11901 DPA10103-DPB12301 DPA10103-DPB13401 DPA10103-DPB13901 DPA10103-DPB14001 DPA10103-DPB14101 DPA10103-DPB14801 DPA10103-DPB15901 DPA10104-DPB11501 DPA10105-DPB10401 DPA10106-DPB10101 DPA10201-DPB10101 DPA10201-DPB110601 DPA10201-DPB11501 DPA10201-DPB11601 DPA10201-DPB11901 DPA10202-DPB10101 DPA10202-DPB10201 DPA10202-DPB10202 DPA10202-DPB10401 DPA10202-DPB110601 DPA10202-DPB11901 DPA10202-DPB13101 DPA10202-DPB16501 DPA10301-DPB10201 DPA10301-DPB10202 DPA10301-DPB10401 DPA10301-DPB10402 DPA10301-DPB110501 DPA10301-DPB110601 DPA10301-DPB11801 DPA10301-DPB12301 DPA10301-DPB13901 DPA10301-DPB14001 DPA10301-DPB14901 DPA10301-DPB15501 DPA10301-DPB16501 DPA10301-DPB17501 DPA10301-DPB18001 DPA10401-DPB10201 DPA10401-DPB10202 DPA10401-DPB10402 DPA10401-DPB10501 DPA10401-DPB110501 DPA10401-DPB14901
PPFLWLGIELLPDK

SEQ ID NO: 6751 - protein, 14 aa, synthetic construct
  source 1..14: note = Seed: PPFLWMGYELHPDK; note = HLAs: DPA10103-DPB10101 DPA10103-DPB10201 DPA10103-DPB10202 DPA10103-DPB10401 DPA10103-DPB112601 DPA10103-DPB11501 DPA10103-DPB11601 DPA10103-DPB11901 DPA10103-DPB12301 DPA10103-DPB13101 DPA10103-DPB13401 DPA10103-DPB13901 DPA10103-DPB14001 DPA10103-DPB14101 DPA10103-DPB14801 DPA10103-DPB15001 DPA10103-DPB15901 DPA10104-DPB10101 DPA10104-DPB11501 DPA10105-DPB10101 DPA10105-DPB10401 DPA10105-DPB15001 DPA10106-DPB10101 DPA10201-DPB10101 DPA10201-DPB110601 DPA10201-DPB11501 DPA10201-DPB11601 DPA10201-DPB11901 DPA10202-DPB10101 DPA10202-DPB10201 DPA10202-DPB10202 DPA10202-DPB10401 DPA10202-DPB110601 DPA10202-DPB11901 DPA10202-DPB13101 DPA10202-DPB16501 DPA10301-DPB10101 DPA10301-DPB10201 DPA10301-DPB10202 DPA10301-DPB10401 DPA10301-DPB10402 DPA10301-DPB110501 DPA10301-DPB110601 DPA10301-DPB11801 DPA10301-DPB12301 DPA10301-DPB13901 DPA10301-DPB14001 DPA10301-DPB14901 DPA10301-DPB15501 DPA10301-DPB16501 DPA10301-DPB17501 DPA10301-DPB18001 DPA10401-DPB10101 DPA10401-DPB10201; note = HLAs: DPA10401-DPB10202 DPA10401-DPB10402 DPA10401-DPB10501 DPA10401-DPB110501 DPA10401-DPB14901
PPFLWVGLELVPDK

SEQ ID NO: 6752 - protein, 14 aa, synthetic construct
  source 1..14: note = Seed: PPFLWMGYELHPDK; note = HLAs: DPA10103-DPB10101 DPA10103-DPB10201 DPA10103-DPB10202 DPA10103-DPB10401 DPA10103-DPB112601 DPA10103-DPB11501 DPA10103-DPB11601 DPA10103-DPB11901 DPA10103-DPB12301 DPA10103-DPB13101 DPA10103-DPB13401 DPA10103-DPB13901 DPA10103-DPB14001 DPA10103-DPB14101 DPA10103-DPB14801 DPA10103-DPB15001 DPA10103-DPB15901 DPA10104-DPB10101 DPA10104-DPB11501 DPA10105-DPB10101 DPA10105-DPB10401 DPA10105-DPB15001 DPA10106-DPB10101 DPA10201-DPB10101 DPA10201-DPB110601 DPA10201-DPB11501 DPA10201-DPB11601 DPA10201-DPB11901 DPA10202-DPB10101 DPA10202-DPB10201 DPA10202-DPB10202 DPA10202-DPB10401 DPA10202-DPB110601 DPA10202-DPB11901 DPA10202-DPB13101 DPA10202-DPB16501 DPA10301-DPB10101 DPA10301-DPB10201 DPA10301-DPB10202 DPA10301-DPB10401 DPA10301-DPB10402 DPA10301-DPB110501 DPA10301-DPB110601 DPA10301-DPB11801 DPA10301-DPB12301 DPA10301-DPB13901 DPA10301-DPB14001 DPA10301-DPB14901 DPA10301-DPB16501 DPA10301-DPB17501 DPA10301-DPB18001 DPA10401-DPB10101 DPA10401-DPB10201 DPA10401-DPB10202; note = HLAs: DPA10401-DPB10402 DPA10401-DPB10501 DPA10401-DPB110501 DPA10401-DPB14901
PPVLWVGFELLPDK

SEQ ID NO: 6753 - protein, 20 aa, synthetic construct
  source 1..20: note = Seed: KEPPFLWMGYELHPDKWTVQ; note = HLAs: DRB1_0101 DPA10103-DPB10101 DPA10103-DPB10201 DPA10103-DPB10202 DPA10103-DPB10401 DPA10103-DPB10402 DPA10103-DPB10501 DPA10103-DPB110501 DPA10103-DPB112601 DPA10103-DPB11501 DPA10103-DPB11601 DPA10103-DPB11801 DPA10103-DPB11901 DPA10103-DPB12301 DPA10103-DPB13101 DPA10103-DPB13401 DPA10103-DPB13901 DPA10103-DPB14001 DPA10103-DPB14101 DPA10103-DPB14801 DPA10103-DPB14901 DPA10103-DPB15001 DPA10103-DPB15101 DPA10103-DPB15501 DPA10103-DPB15901 DPA10103-DPB18001 DPA10104-DPB10101 DPA10104-DPB11501 DPA10105-DPB10101 DPA10105-DPB10401 DPA10105-DPB11801 DPA10105-DPB15001 DPA10106-DPB10101 DPA10201-DPB10101 DPA10201-DPB10201 DPA10201-DPB10202 DPA10201-DPB10401 DPA10201-DPB10501 DPA10201-DPB110601 DPA10201-DPB11501 DPA10201-DPB11601 DPA10201-DPB11901 DPA10201-DPB13401 DPA10201-DPB15501 DPA10202-DPB10101 DPA10202-DPB10201 DPA10202-DPB10202 DPA10202-DPB10401 DPA10202-DPB10501 DPA10202-DPB110601 DPA10202-DPB11101 DPA10202-DPB11301 DPA10202-DPB11801 DPA10202-DPB11901 DPA10202-DPB13101; note = HLAs: DPA10202-DPB13801 DPA10202-DPB15501 DPA10202-DPB16501 DPA10301-DPB10101 DPA10301-DPB10201 DPA10301-DPB10202 DPA10301-DPB10401 DPA10301-DPB10402 DPA10301-DPB110501 DPA10301-DPB110601 DPA10301-DPB11101 DPA10301-DPB11301 DPA10301-DPB11801 DPA10301-DPB12301 DPA10301-DPB13901 DPA10301-DPB14001 DPA10301-DPB14901 DPA10301-DPB15501 DPA10301-DPB16501 DPA10301-DPB17501 DPA10301-DPB18001 DPA10401-DPB10101 DPA10401-DPB10201 DPA10401-DPB10202 DPA10401-DPB10402 DPA10401-DPB10501 DPA10401-DPB110501 DPA10401-DPB14901
KEPPYLWHGFELAPDKWTVQ

SEQ ID NO: 6754 - protein, 20 aa, synthetic construct
  source 1..20: note = Seed: KEPPFLWMGYELHPDKWTVQ; note = HLAs: DRB1_0101 DRB1_1001 DPA10103-DPB10101 DPA10103-DPB10201 DPA10103-DPB10202 DPA10103-DPB10401 DPA10103-DPB10402 DPA10103-DPB10501 DPA10103-DPB110501 DPA10103-DPB112601 DPA10103-DPB11501 DPA10103-DPB11601 DPA10103-DPB11801 DPA10103-DPB11901 DPA10103-DPB12301 DPA10103-DPB13101 DPA10103-DPB13401 DPA10103-DPB13901 DPA10103-DPB14001 DPA10103-DPB14101 DPA10103-DPB14801 DPA10103-DPB14901 DPA10103-DPB15001 DPA10103-DPB15101 DPA10103-DPB15501 DPA10103-DPB15901 DPA10103-DPB18001 DPA10104-DPB10101 DPA10104-DPB11501 DPA10105-DPB10101 DPA10105-DPB10401 DPA10105-DPB11801 DPA10105-DPB15001 DPA10106-DPB10101 DPA10201-DPB10101 DPA10201-DPB10201 DPA10201-DPB10202 DPA10201-DPB10401 DPA10201-DPB10501 DPA10201-DPB110601 DPA10201-DPB11501 DPA10201-DPB11601 DPA10201-DPB11901 DPA10201-DPB13401 DPA10201-DPB15501 DPA10202-DPB10101 DPA10202-DPB10201 DPA10202-DPB10202 DPA10202-DPB10401 DPA10202-DPB10501 DPA10202-DPB110601 DPA10202-DPB11101 DPA10202-DPB11301 DPA10202-DPB11801 DPA10202-DPB11901; note = HLAs: DPA10202-DPB13101 DPA10202-DPB13801 DPA10202-DPB15501 DPA10202-DPB16501 DPA10301-DPB10101 DPA10301-DPB10201 DPA10301-DPB10202 DPA10301-DPB10401 DPA10301-DPB10402 DPA10301-DPB110501 DPA10301-DPB110601 DPA10301-DPB11301 DPA10301-DPB11801 DPA10301-DPB12301 DPA10301-DPB13901 DPA10301-DPB14001 DPA10301-DPB14901 DPA10301-DPB15501 DPA10301-DPB16501 DPA10301-DPB17501 DPA10301-DPB18001 DPA10401-DPB10101 DPA10401-DPB10201 DPA10401-DPB10202 DPA10401-DPB10402 DPA10401-DPB10501 DPA10401-DPB110501 DPA10401-DPB14901
KEPPFLWQGLELLPDKWTVQ

SEQ ID NO: 6755 - protein, 14 aa, synthetic construct
  source 1..14: note = Seed: PPFLWMGYELHPDK; note = HLAs: DRB1_1001 DPA10103-DPB10101 DPA10103-DPB10201 DPA10103-DPB10202 DPA10103-DPB10401 DPA10103-DPB112601 DPA10103-DPB11501 DPA10103-DPB11601 DPA10103-DPB11901 DPA10103-DPB12301 DPA10103-DPB13101 DPA10103-DPB13401 DPA10103-DPB13901 DPA10103-DPB14001 DPA10103-DPB14101 DPA10103-DPB14801 DPA10103-DPB15001 DPA10103-DPB15901 DPA10104-DPB10101 DPA10104-DPB11501 DPA10105-DPB10101 DPA10105-DPB10401 DPA10105-DPB15001 DPA10106-DPB10101 DPA10201-DPB10101 DPA10201-DPB110601 DPA10201-DPB11501 DPA10201-DPB11601 DPA10201-DPB11901 DPA10202-DPB10101 DPA10202-DPB10201 DPA10202-DPB10202 DPA10202-DPB10401 DPA10202-DPB110601 DPA10202-DPB11901 DPA10202-DPB13101 DPA10202-DPB16501 DPA10301-DPB10101 DPA10301-DPB10201 DPA10301-DPB10202 DPA10301-DPB10401 DPA10301-DPB10402 DPA10301-DPB110501 DPA10301-DPB110601 DPA10301-DPB11801 DPA10301-DPB12301 DPA10301-DPB13901 DPA10301-DPB14001 DPA10301-DPB14901 DPA10301-DPB16501 DPA10301-DPB17501 DPA10301-DPB18001 DPA10401-DPB10101 DPA10401-DPB10201 DPA10401-DPB10202; note = HLAs: DPA10401-DPB10402 DPA10401-DPB10501 DPA10401-DPB110501 DPA10401-DPB14901
PPILWLGFELLPDK

SEQ ID NO: 6756 - protein, 14 aa, synthetic construct
  source 1..14: note = Seed: PPFLWMGYELHPDK; note = HLAs: DPA10103-DPB10101 DPA10103-DPB10201 DPA10103-DPB10202 DPA10103-DPB10401 DPA10103-DPB112601 DPA10103-DPB11501 DPA10103-DPB11601 DPA10103-DPB11901 DPA10103-DPB12301 DPA10103-DPB13101 DPA10103-DPB13401 DPA10103-DPB13901 DPA10103-DPB14001 DPA10103-DPB14101 DPA10103-DPB14801 DPA10103-DPB15001 DPA10103-DPB15901 DPA10104-DPB10101 DPA10104-DPB11501 DPA10105-DPB10101 DPA10105-DPB10401 DPA10105-DPB15001 DPA10106-DPB10101 DPA10201-DPB10101 DPA10201-DPB110601 DPA10201-DPB11501 DPA10201-DPB11601 DPA10201-DPB11901 DPA10202-DPB10101 DPA10202-DPB10201 DPA10202-DPB10202 DPA10202-DPB10401 DPA10202-DPB110601 DPA10202-DPB11901 DPA10202-DPB13101 DPA10202-DPB16501 DPA10301-DPB10101 DPA10301-DPB10201 DPA10301-DPB10202 DPA10301-DPB10401 DPA10301-DPB10402 DPA10301-DPB110501 DPA10301-DPB110601 DPA10301-DPB11801 DPA10301-DPB12301 DPA10301-DPB13901 DPA10301-DPB14001 DPA10301-DPB14901 DPA10301-DPB15501 DPA10301-DPB16501 DPA10301-DPB17501 DPA10301-DPB18001 DPA10401-DPB10101 DPA10401-DPB10201; note = HLAs: DPA10401-DPB10202 DPA10401-DPB10402 DPA10401-DPB10501 DPA10401-DPB110501 DPA10401-DPB14901
PPFLWTGIELFPDK

SEQ ID NO: 6757 - protein, 14 aa, synthetic construct
  source 1..14: note = Seed: PPFLWMGYELHPDK; note = HLAs: DRB1_1001 DPA10103-DPB10101 DPA10103-DPB10201 DPA10103-DPB10202 DPA10103-DPB10401 DPA10103-DPB112601 DPA10103-DPB11501 DPA10103-DPB11601 DPA10103-DPB11901 DPA10103-DPB12301 DPA10103-DPB13101 DPA10103-DPB13401 DPA10103-DPB13901 DPA10103-DPB14001 DPA10103-DPB14101 DPA10103-DPB14801 DPA10103-DPB15001 DPA10103-DPB15901 DPA10104-DPB10101 DPA10104-DPB11501 DPA10105-DPB10101 DPA10105-DPB10401 DPA10105-DPB15001 DPA10106-DPB10101 DPA10201-DPB10101 DPA10201-DPB110601 DPA10201-DPB11501 DPA10201-DPB11601 DPA10201-DPB11901 DPA10202-DPB10101 DPA10202-DPB10201 DPA10202-DPB10202 DPA10202-DPB10401 DPA10202-DPB110601 DPA10202-DPB11901 DPA10202-DPB13101 DPA10202-DPB16501 DPA10301-DPB10101 DPA10301-DPB10201 DPA10301-DPB10202 DPA10301-DPB10401 DPA10301-DPB10402 DPA10301-DPB110501 DPA10301-DPB110601 DPA10301-DPB11801 DPA10301-DPB12301 DPA10301-DPB13901 DPA10301-DPB14001 DPA10301-DPB14901 DPA10301-DPB16501 DPA10301-DPB17501 DPA10301-DPB18001 DPA10401-DPB10101 DPA10401-DPB10201 DPA10401-DPB10202; note = HLAs: DPA10401-DPB10402 DPA10401-DPB10501 DPA10401-DPB110501 DPA10401-DPB14901
PPMLWMGFELLPDK

SEQ ID NO: 6758 - protein, 14 aa, synthetic construct
  source 1..14: note = Seed: PPFLWMGYELHPDK; note = HLAs: DRB1_1001 DPA10103-DPB10101 DPA10103-DPB10201 DPA10103-DPB10202 DPA10103-DPB10401 DPA10103-DPB112601 DPA10103-DPB11501 DPA10103-DPB11601 DPA10103-DPB11901 DPA10103-DPB12301 DPA10103-DPB13101 DPA10103-DPB13401 DPA10103-DPB13901 DPA10103-DPB14001 DPA10103-DPB14101 DPA10103-DPB14801 DPA10103-DPB15001 DPA10103-DPB15901 DPA10104-DPB10101 DPA10104-DPB11501 DPA10105-DPB10101 DPA10105-DPB10401 DPA10105-DPB15001 DPA10106-DPB10101 DPA10201-DPB10101 DPA10201-DPB110601 DPA10201-DPB11501 DPA10201-DPB11601 DPA10201-DPB11901 DPA10202-DPB10101 DPA10202-DPB10201 DPA10202-DPB10202 DPA10202-DPB10401 DPA10202-DPB110601 DPA10202-DPB11901 DPA10202-DPB13101 DPA10202-DPB16501 DPA10301-DPB10101 DPA10301-DPB10201 DPA10301-DPB10202 DPA10301-DPB10401 DPA10301-DPB10402 DPA10301-DPB110501 DPA10301-DPB110601 DPA10301-DPB11801 DPA10301-DPB12301 DPA10301-DPB13901 DPA10301-DPB14001 DPA10301-DPB14901 DPA10301-DPB15501 DPA10301-DPB16501 DPA10301-DPB17501 DPA10301-DPB18001 DPA10401-DPB10101 DPA10401-DPB10201; note = HLAs: DPA10401-DPB10202 DPA10401-DPB10402 DPA10401-DPB10501 DPA10401-DPB110501 DPA10401-DPB14901
PPFLWLGYELMPDK

SEQ ID NO: 6759 - protein, 20 aa, synthetic construct
  source 1..20: note = Seed: KEPPFLWMGYELHPDKWTVQ; note = HLAs: DPA10103-DPB10101 DPA10103-DPB10201 DPA10103-DPB10202 DPA10103-DPB10401 DPA10103-DPB10402 DPA10103-DPB10501 DPA10103-DPB110501 DPA10103-DPB112601 DPA10103-DPB11501 DPA10103-DPB11601 DPA10103-DPB11801 DPA10103-DPB11901 DPA10103-DPB12301 DPA10103-DPB13101 DPA10103-DPB13401 DPA10103-DPB13901 DPA10103-DPB14001 DPA10103-DPB14101 DPA10103-DPB14801 DPA10103-DPB14901 DPA10103-DPB15001 DPA10103-DPB15101 DPA10103-DPB15501 DPA10103-DPB15901 DPA10103-DPB18001 DPA10104-DPB10101 DPA10104-DPB11501 DPA10105-DPB10101 DPA10105-DPB10401 DPA10105-DPB11801 DPA10105-DPB15001 DPA10106-DPB10101 DPA10201-DPB10101 DPA10201-DPB10201 DPA10201-DPB10202 DPA10201-DPB10401 DPA10201-DPB10501 DPA10201-DPB110601 DPA10201-DPB11501 DPA10201-DPB11601 DPA10201-DPB11901 DPA10201-DPB13401 DPA10201-DPB15501 DPA10202-DPB10101 DPA10202-DPB10201 DPA10202-DPB10202 DPA10202-DPB10401 DPA10202-DPB10501 DPA10202-DPB110601 DPA10202-DPB11101 DPA10202-DPB11301 DPA10202-DPB11801 DPA10202-DPB11901 DPA10202-DPB13101 DPA10202-DPB13801; note = HLAs: DPA10202-DPB15501 DPA10202-DPB16501 DPA10301-DPB10101 DPA10301-DPB10201 DPA10301-DPB10202 DPA10301-DPB10401 DPA10301-DPB10402 DPA10301-DPB110501 DPA10301-DPB110601 DPA10301-DPB11101 DPA10301-DPB11301 DPA10301-DPB11801 DPA10301-DPB12301 DPA10301-DPB13901 DPA10301-DPB14001 DPA10301-DPB14901 DPA10301-DPB15501 DPA10301-DPB16501 DPA10301-DPB17501 DPA10301-DPB18001 DPA10401-DPB10101 DPA10401-DPB10201 DPA10401-DPB10202 DPA10401-DPB10402 DPA10401-DPB10501 DPA10401-DPB110501 DPA10401-DPB14901
KEPPFLWTGFELKPDKWTVQ

SEQ ID NO: 6760 - protein, 14 aa, synthetic construct
  source 1..14: note = Seed: PPFLWMGYELHPDK; note = HLAs: DRB1_1001 DPA10103-DPB10101 DPA10103-DPB10201 DPA10103-DPB10202 DPA10103-DPB10401 DPA10103-DPB112601 DPA10103-DPB11501 DPA10103-DPB11601 DPA10103-DPB11901 DPA10103-DPB12301 DPA10103-DPB13101 DPA10103-DPB13401 DPA10103-DPB13901 DPA10103-DPB14001 DPA10103-DPB14101 DPA10103-DPB14801 DPA10103-DPB15001 DPA10103-DPB15901 DPA10104-DPB10101 DPA10104-DPB11501 DPA10105-DPB10101 DPA10105-DPB10401 DPA10105-DPB15001 DPA10106-DPB10101 DPA10201-DPB10101 DPA10201-DPB110601 DPA10201-DPB11501 DPA10201-DPB11601 DPA10201-DPB11901 DPA10202-DPB10101 DPA10202-DPB10201 DPA10202-DPB10202 DPA10202-DPB10401 DPA10202-DPB110601 DPA10202-DPB11901 DPA10202-DPB13101 DPA10202-DPB16501 DPA10301-DPB10101 DPA10301-DPB10201 DPA10301-DPB10202 DPA10301-DPB10401 DPA10301-DPB10402 DPA10301-DPB110501 DPA10301-DPB110601 DPA10301-DPB11801 DPA10301-DPB12301 DPA10301-DPB13901 DPA10301-DPB14001 DPA10301-DPB14901 DPA10301-DPB15501 DPA10301-DPB16501 DPA10301-DPB17501 DPA10301-DPB18001 DPA10401-DPB10101 DPA10401-DPB10201; note = HLAs: DPA10401-DPB10202 DPA10401-DPB10402 DPA10401-DPB10501 DPA10401-DPB110501 DPA10401-DPB14901
PPFLWMGLELLPDK

SEQ ID NO: 6761 - protein, 20 aa, synthetic construct
  source 1..20: note = Seed: KEPPFLWMGYELHPDKWTVQ; note = HLAs: DRB1_0101 DRB1_1001 DPA10103-DPB10101 DPA10103-DPB10201 DPA10103-DPB10202 DPA10103-DPB10401 DPA10103-DPB10402 DPA10103-DPB10501 DPA10103-DPB110501 DPA10103-DPB112601 DPA10103-DPB11501 DPA10103-DPB11601 DPA10103-DPB11801 DPA10103-DPB11901 DPA10103-DPB12301 DPA10103-DPB13101 DPA10103-DPB13401 DPA10103-DPB13901 DPA10103-DPB14001 DPA10103-DPB14101 DPA10103-DPB14801 DPA10103-DPB14901 DPA10103-DPB15001 DPA10103-DPB15101 DPA10103-DPB15501 DPA10103-DPB15901 DPA10103-DPB18001 DPA10104-DPB10101 DPA10104-DPB11501 DPA10105-DPB10101 DPA10105-DPB10401 DPA10105-DPB11801 DPA10105-DPB15001 DPA10106-DPB10101 DPA10201-DPB10101 DPA10201-DPB10201 DPA10201-DPB10202 DPA10201-DPB10401 DPA10201-DPB10501 DPA10201-DPB110601 DPA10201-DPB11501 DPA10201-DPB11601 DPA10201-DPB11901 DPA10201-DPB13401 DPA10201-DPB15501 DPA10202-DPB10101 DPA10202-DPB10201 DPA10202-DPB10202 DPA10202-DPB10401 DPA10202-DPB10501 DPA10202-DPB110601 DPA10202-DPB11101 DPA10202-DPB11301 DPA10202-DPB11801 DPA10202-DPB11901; note = HLAs: DPA10202-DPB13101 DPA10202-DPB13801 DPA10202-DPB15501 DPA10202-DPB16501 DPA10301-DPB10101 DPA10301-DPB10201 DPA10301-DPB10202 DPA10301-DPB10401 DPA10301-DPB10402 DPA10301-DPB110501 DPA10301-DPB110601 DPA10301-DPB11101 DPA10301-DPB11301 DPA10301-DPB11801 DPA10301-DPB12301 DPA10301-DPB13901 DPA10301-DPB14001 DPA10301-DPB14901 DPA10301-DPB15501 DPA10301-DPB16501 DPA10301-DPB17501 DPA10301-DPB18001 DPA10401-DPB10101 DPA10401-DPB10201 DPA10401-DPB10202 DPA10401-DPB10402 DPA10401-DPB10501 DPA10401-DPB110501 DPA10401-DPB14901
KEPPYLWVGFELAPDKWTVQ

SEQ ID NO: 6762 - protein, 20 aa, synthetic construct
  source 1..20: note = Seed: KEPPFLWMGYELHPDKWTVQ; note = HLAs: DRB1_0101 DPA10103-DPB10101 DPA10103-DPB10201 DPA10103-DPB10202 DPA10103-DPB10401 DPA10103-DPB10402 DPA10103-DPB10501 DPA10103-DPB110501 DPA10103-DPB112601 DPA10103-DPB11501 DPA10103-DPB11601 DPA10103-DPB11801 DPA10103-DPB11901 DPA10103-DPB12301 DPA10103-DPB13101 DPA10103-DPB13401 DPA10103-DPB13901 DPA10103-DPB14001 DPA10103-DPB14101 DPA10103-DPB14801 DPA10103-DPB14901 DPA10103-DPB15001 DPA10103-DPB15101 DPA10103-DPB15501 DPA10103-DPB15901 DPA10103-DPB18001 DPA10104-DPB10101 DPA10104-DPB11501 DPA10105-DPB10101 DPA10105-DPB10401 DPA10105-DPB11801 DPA10105-DPB15001 DPA10106-DPB10101 DPA10201-DPB10101 DPA10201-DPB10201 DPA10201-DPB10202 DPA10201-DPB10401 DPA10201-DPB10501 DPA10201-DPB110601 DPA10201-DPB11501 DPA10201-DPB11601 DPA10201-DPB11901 DPA10201-DPB13401 DPA10201-DPB15501 DPA10202-DPB10101 DPA10202-DPB10201 DPA10202-DPB10202 DPA10202-DPB10401 DPA10202-DPB10501 DPA10202-DPB110601 DPA10202-DPB11101 DPA10202-DPB11301 DPA10202-DPB11801 DPA10202-DPB11901 DPA10202-DPB13101; note = HLAs: DPA10202-DPB13801 DPA10202-DPB15501 DPA10202-DPB16501 DPA10301-DPB10101 DPA10301-DPB10201 DPA10301-DPB10202 DPA10301-DPB10401 DPA10301-DPB10402 DPA10301-DPB110501 DPA10301-DPB110601 DPA10301-DPB11101 DPA10301-DPB11301 DPA10301-DPB11801 DPA10301-DPB12301 DPA10301-DPB13901 DPA10301-DPB14001 DPA10301-DPB14901 DPA10301-DPB15501 DPA10301-DPB16501 DPA10301-DPB17501 DPA10301-DPB18001 DPA10401-DPB10101 DPA10401-DPB10201 DPA10401-DPB10202 DPA10401-DPB10402 DPA10401-DPB10501 DPA10401-DPB110501 DPA10401-DPB14901
KEPPFLWVGFELQPDKWTVQ

SEQ ID NO: 6763 - protein, 14 aa, synthetic construct
  source 1..14: note = Seed: PPFLWMGYELHPDK; note = HLAs: DRB1_1001 DPA10103-DPB10101 DPA10103-DPB10201 DPA10103-DPB10202 DPA10103-DPB10401 DPA10103-DPB112601 DPA10103-DPB11501 DPA10103-DPB11601 DPA10103-DPB11901 DPA10103-DPB12301 DPA10103-DPB13101 DPA10103-DPB13401 DPA10103-DPB13901 DPA10103-DPB14001 DPA10103-DPB14101 DPA10103-DPB14801 DPA10103-DPB15001 DPA10103-DPB15901 DPA10104-DPB10101 DPA10104-DPB11501 DPA10105-DPB10101 DPA10105-DPB10401 DPA10105-DPB15001 DPA10106-DPB10101 DPA10201-DPB10101 DPA10201-DPB110601 DPA10201-DPB11501 DPA10201-DPB11601 DPA10201-DPB11901 DPA10202-DPB10101 DPA10202-DPB10201 DPA10202-DPB10202 DPA10202-DPB10401 DPA10202-DPB110601 DPA10202-DPB11901 DPA10202-DPB13101 DPA10202-DPB16501 DPA10301-DPB10101 DPA10301-DPB10201 DPA10301-DPB10202 DPA10301-DPB10401 DPA10301-DPB10402 DPA10301-DPB110501 DPA10301-DPB110601 DPA10301-DPB11801 DPA10301-DPB12301 DPA10301-DPB13901 DPA10301-DPB14001 DPA10301-DPB14901 DPA10301-DPB15501 DPA10301-DPB16501 DPA10301-DPB17501 DPA10301-DPB18001 DPA10401-DPB10101 DPA10401-DPB10201; note = HLAs: DPA10401-DPB10202 DPA10401-DPB10402 DPA10401-DPB10501 DPA10401-DPB110501 DPA10401-DPB14901
PPFLWIGLELIPDK

SEQ ID NO: 6764 - protein, 20 aa, synthetic construct
  source 1..20: note = Seed: KEPPFLWMGYELHPDKWTVQ; note = HLAs: DRB1_0101 DPA10103-DPB10101 DPA10103-DPB10201 DPA10103-DPB10202 DPA10103-DPB10401 DPA10103-DPB10402 DPA10103-DPB10501 DPA10103-DPB110501 DPA10103-DPB112601 DPA10103-DPB11501 DPA10103-DPB11601 DPA10103-DPB11801 DPA10103-DPB11901 DPA10103-DPB12301 DPA10103-DPB13101 DPA10103-DPB13401 DPA10103-DPB13901 DPA10103-DPB14001 DPA10103-DPB14101 DPA10103-DPB14801 DPA10103-DPB14901 DPA10103-DPB15001 DPA10103-DPB15101 DPA10103-DPB15501 DPA10103-DPB15901 DPA10103-DPB18001 DPA10104-DPB10101 DPA10104-DPB11501 DPA10105-DPB10101 DPA10105-DPB10401 DPA10105-DPB11801 DPA10105-DPB15001 DPA10106-DPB10101 DPA10201-DPB10101 DPA10201-DPB10201 DPA10201-DPB10202 DPA10201-DPB10401 DPA10201-DPB10501 DPA10201-DPB110601 DPA10201-DPB11501 DPA10201-DPB11601 DPA10201-DPB11901 DPA10201-DPB13401 DPA10201-DPB15501 DPA10202-DPB10101 DPA10202-DPB10201 DPA10202-DPB10202 DPA10202-DPB10401 DPA10202-DPB10501 DPA10202-DPB110601 DPA10202-DPB11101 DPA10202-DPB11301 DPA10202-DPB11801 DPA10202-DPB11901 DPA10202-DPB13101; note = HLAs: DPA10202-DPB13801 DPA10202-DPB15501 DPA10202-DPB16501 DPA10301-DPB10101 DPA10301-DPB10201 DPA10301-DPB10202 DPA10301-DPB10401 DPA10301-DPB10402 DPA10301-DPB110501 DPA10301-DPB110601 DPA10301-DPB11101 DPA10301-DPB11301 DPA10301-DPB11801 DPA10301-DPB12301 DPA10301-DPB13901 DPA10301-DPB14001 DPA10301-DPB14901 DPA10301-DPB15501 DPA10301-DPB16501 DPA10301-DPB17501 DPA10301-DPB18001 DPA10401-DPB10101 DPA10401-DPB10201 DPA10401-DPB10202 DPA10401-DPB10402 DPA10401-DPB10501 DPA10401-DPB110501 DPA10401-DPB14901
KEPPFLWIGWELIPDKWTVQ

SEQ ID NO: 6765 - protein, 14 aa, synthetic construct
  source 1..14: note = Seed: PPFLWMGYELHPDK; note = HLAs: DRB1_1001 DPA10103-DPB10101 DPA10103-DPB10201 DPA10103-DPB10202 DPA10103-DPB10401 DPA10103-DPB112601 DPA10103-DPB11501 DPA10103-DPB11601 DPA10103-DPB11901 DPA10103-DPB12301 DPA10103-DPB13101 DPA10103-DPB13401 DPA10103-DPB13901 DPA10103-DPB14001 DPA10103-DPB14101 DPA10103-DPB14801 DPA10103-DPB15001 DPA10103-DPB15901 DPA10104-DPB10101 DPA10104-DPB11501 DPA10105-DPB10101 DPA10105-DPB10401 DPA10105-DPB15001 DPA10106-DPB10101 DPA10201-DPB10101 DPA10201-DPB110601 DPA10201-DPB11501 DPA10201-DPB11601 DPA10201-DPB11901 DPA10202-DPB10101 DPA10202-DPB10201 DPA10202-DPB10202 DPA10202-DPB10401 DPA10202-DPB110601 DPA10202-DPB11901 DPA10202-DPB13101 DPA10202-DPB16501 DPA10301-DPB10101 DPA10301-DPB10201 DPA10301-DPB10202 DPA10301-DPB10401 DPA10301-DPB10402 DPA10301-DPB110501 DPA10301-DPB110601 DPA10301-DPB11801 DPA10301-DPB12301 DPA10301-DPB13901 DPA10301-DPB14001 DPA10301-DPB14901 DPA10301-DPB15501 DPA10301-DPB16501 DPA10301-DPB17501 DPA10301-DPB18001 DPA10401-DPB10101 DPA10401-DPB10201; note = HLAs: DPA10401-DPB10202 DPA10401-DPB10402 DPA10401-DPB10501 DPA10401-DPB110501 DPA10401-DPB14901
PPFLWQGLELIPDK

SEQ ID NO: 6766 - protein, 20 aa, synthetic construct
  source 1..20: note = Seed: KEPPFLWMGYELHPDKWTVQ; note = HLAs: DRB1_1001 DPA10103-DPB10101 DPA10103-DPB10201 DPA10103-DPB10202 DPA10103-DPB10401 DPA10103-DPB10402 DPA10103-DPB10501 DPA10103-DPB110501 DPA10103-DPB112601 DPA10103-DPB11501 DPA10103-DPB11601 DPA10103-DPB11801 DPA10103-DPB11901 DPA10103-DPB12301 DPA10103-DPB13101 DPA10103-DPB13401 DPA10103-DPB13901 DPA10103-DPB14001 DPA10103-DPB14101 DPA10103-DPB14801 DPA10103-DPB14901 DPA10103-DPB15001 DPA10103-DPB15101 DPA10103-DPB15501 DPA10103-DPB15901 DPA10103-DPB18001 DPA10104-DPB10101 DPA10104-DPB11501 DPA10105-DPB10101 DPA10105-DPB10401 DPA10105-DPB11801 DPA10105-DPB15001 DPA10106-DPB10101 DPA10201-DPB10101 DPA10201-DPB10201 DPA10201-DPB10202 DPA10201-DPB10401 DPA10201-DPB10501 DPA10201-DPB110601 DPA10201-DPB11501 DPA10201-DPB11601 DPA10201-DPB11901 DPA10201-DPB13401 DPA10201-DPB15501 DPA10202-DPB10101 DPA10202-DPB10201 DPA10202-DPB10202 DPA10202-DPB10401 DPA10202-DPB10501 DPA10202-DPB110601 DPA10202-DPB11101 DPA10202-DPB11301 DPA10202-DPB11801 DPA10202-DPB11901 DPA10202-DPB13101; note = HLAs: DPA10202-DPB13801 DPA10202-DPB15501 DPA10202-DPB16501 DPA10301-DPB10101 DPA10301-DPB10201 DPA10301-DPB10202 DPA10301-DPB10401 DPA10301-DPB10402 DPA10301-DPB110501 DPA10301-DPB110601 DPA10301-DPB11101 DPA10301-DPB11301 DPA10301-DPB11801 DPA10301-DPB12301 DPA10301-DPB13901 DPA10301-DPB14001 DPA10301-DPB14901 DPA10301-DPB15501 DPA10301-DPB16501 DPA10301-DPB17501 DPA10301-DPB18001 DPA10401-DPB10101 DPA10401-DPB10201 DPA10401-DPB10202 DPA10401-DPB10402 DPA10401-DPB10501 DPA10401-DPB110501 DPA10401-DPB14901
KEPPFLWLGFELEPDKWTVQ

SEQ ID NO: 6767 - protein, 14 aa, synthetic construct
  source 1..14: note = Seed: PPFLWMGYELHPDK; note = HLAs: DPA10103-DPB10101 DPA10103-DPB10201 DPA10103-DPB10202 DPA10103-DPB10401 DPA10103-DPB112601 DPA10103-DPB11501 DPA10103-DPB11601 DPA10103-DPB11901 DPA10103-DPB12301 DPA10103-DPB13101 DPA10103-DPB13401 DPA10103-DPB13901 DPA10103-DPB14001 DPA10103-DPB14101 DPA10103-DPB14801 DPA10103-DPB15001 DPA10103-DPB15901 DPA10104-DPB10101 DPA10104-DPB11501 DPA10105-DPB10101 DPA10105-DPB10401 DPA10105-DPB15001 DPA10106-DPB10101 DPA10201-DPB10101 DPA10201-DPB110601 DPA10201-DPB11501 DPA10201-DPB11601 DPA10201-DPB11901 DPA10202-DPB10101 DPA10202-DPB10201 DPA10202-DPB10202 DPA10202-DPB10401 DPA10202-DPB110601 DPA10202-DPB11901 DPA10202-DPB13101 DPA10202-DPB16501 DPA10301-DPB10101 DPA10301-DPB10201 DPA10301-DPB10202 DPA10301-DPB10401 DPA10301-DPB10402 DPA10301-DPB110501 DPA10301-DPB110601 DPA10301-DPB12301 DPA10301-DPB13901 DPA10301-DPB14001 DPA10301-DPB14901 DPA10301-DPB16501 DPA10301-DPB17501 DPA10301-DPB18001 DPA10401-DPB10101 DPA10401-DPB10201 DPA10401-DPB10202 DPA10401-DPB10402; note = HLAs: DPA10401-DPB10501 DPA10401-DPB110501 DPA10401-DPB14901
PPCLWTGFELLPDK

SEQ ID NO: 6768 - protein, 14 aa, synthetic construct
  source 1..14: note = Seed: PPFLWMGYELHPDK; note = HLAs: DRB1_1001 DPA10103-DPB10101 DPA10103-DPB10201 DPA10103-DPB10202 DPA10103-DPB10401 DPA10103-DPB112601 DPA10103-DPB11501 DPA10103-DPB11601 DPA10103-DPB11901 DPA10103-DPB12301 DPA10103-DPB13101 DPA10103-DPB13401 DPA10103-DPB13901 DPA10103-DPB14001 DPA10103-DPB14101 DPA10103-DPB14801 DPA10103-DPB15001 DPA10103-DPB15901 DPA10104-DPB10101 DPA10104-DPB11501 DPA10105-DPB10101 DPA10105-DPB10401 DPA10105-DPB15001 DPA10106-DPB10101 DPA10201-DPB10101 DPA10201-DPB110601 DPA10201-DPB11501 DPA10201-DPB11601 DPA10201-DPB11901 DPA10202-DPB10101 DPA10202-DPB10201 DPA10202-DPB10202 DPA10202-DPB10401 DPA10202-DPB110601 DPA10202-DPB11901 DPA10202-DPB13101 DPA10202-DPB16501 DPA10301-DPB10101 DPA10301-DPB10201 DPA10301-DPB10202 DPA10301-DPB10401 DPA10301-DPB10402 DPA10301-DPB110501 DPA10301-DPB110601 DPA10301-DPB11801 DPA10301-DPB12301 DPA10301-DPB13901 DPA10301-DPB14001 DPA10301-DPB14901 DPA10301-DPB15501 DPA10301-DPB16501 DPA10301-DPB17501 DPA10301-DPB18001 DPA10401-DPB10101 DPA10401-DPB10201; note = HLAs: DPA10401-DPB10202 DPA10401-DPB10402 DPA10401-DPB10501 DPA10401-DPB110501 DPA10401-DPB14901
PPFLWLGWELLPDK

SEQ ID NO: 6769 - protein, 14 aa, synthetic construct
  source 1..14: note = Seed: PPFLWMGYELHPDK; note = HLAs: DPA10103-DPB10101 DPA10103-DPB10201 DPA10103-DPB10202 DPA10103-DPB10401 DPA10103-DPB112601 DPA10103-DPB11501 DPA10103-DPB11601 DPA10103-DPB11901 DPA10103-DPB12301 DPA10103-DPB13101 DPA10103-DPB13401 DPA10103-DPB13901 DPA10103-DPB14001 DPA10103-DPB14101 DPA10103-DPB14801 DPA10103-DPB15001 DPA10103-DPB15901 DPA10104-DPB10101 DPA10104-DPB11501 DPA10105-DPB10101 DPA10105-DPB10401 DPA10105-DPB15001 DPA10106-DPB10101 DPA10201-DPB10101 DPA10201-DPB110601 DPA10201-DPB11501 DPA10201-DPB11601 DPA10201-DPB11901 DPA10202-DPB10101 DPA10202-DPB10201 DPA10202-DPB10202 DPA10202-DPB10401 DPA10202-DPB110601 DPA10202-DPB11901 DPA10202-DPB13101 DPA10202-DPB16501 DPA10301-DPB10101 DPA10301-DPB10201 DPA10301-DPB10202 DPA10301-DPB10401 DPA10301-DPB10402 DPA10301-DPB110501 DPA10301-DPB110601 DPA10301-DPB11801 DPA10301-DPB12301 DPA10301-DPB13901 DPA10301-DPB14001 DPA10301-DPB14901 DPA10301-DPB15501 DPA10301-DPB16501 DPA10301-DPB17501 DPA10301-DPB18001 DPA10401-DPB10101 DPA10401-DPB10201; note = HLAs: DPA10401-DPB10202 DPA10401-DPB10402 DPA10401-DPB10501 DPA10401-DPB110501 DPA10401-DPB14901
PPFLWIGMELLPDK

SEQ ID NO: 6770 - protein, 20 aa, synthetic construct
  source 1..20: note = Seed: KEPPFLWMGYELHPDKWTVQ; note = HLAs: DRB1_1602 DQA10101-DQB10501 DQA10101-DQB10503 DQA10102-DQB10501 DQA10102-DQB10502 DQA10102-DQB10503 DQA10103-DQB10501 DQA10104-DQB10501 DQA10104-DQB10503 DQA10105-DQB10501 DQA10107-DQB10503 DQA10505-DQB10402
KEPPFLFMGFEIHPIKWTVQ

SEQ ID NO: 6771 - protein, 20 aa, synthetic construct
  source 1..20: note = Seed: KEPPFLWMGYELHPDKWTVQ; note = HLAs: DPA10103-DPB10101 DPA10103-DPB10201 DPA10103-DPB10202 DPA10103-DPB10401 DPA10103-DPB10402 DPA10103-DPB10501 DPA10103-DPB110501 DPA10103-DPB112601 DPA10103-DPB11501 DPA10103-DPB11601 DPA10103-DPB11801 DPA10103-DPB11901 DPA10103-DPB12301 DPA10103-DPB13101 DPA10103-DPB13401 DPA10103-DPB13901 DPA10103-DPB14001 DPA10103-DPB14101 DPA10103-DPB14801 DPA10103-DPB14901 DPA10103-DPB15001 DPA10103-DPB15101 DPA10103-DPB15501 DPA10103-DPB15901 DPA10103-DPB18001 DPA10104-DPB10101 DPA10104-DPB11501 DPA10105-DPB10101 DPA10105-DPB10401 DPA10105-DPB11801 DPA10105-DPB15001 DPA10106-DPB10101 DPA10201-DPB10101 DPA10201-DPB10201 DPA10201-DPB10202 DPA10201-DPB10401 DPA10201-DPB10501 DPA10201-DPB110601 DPA10201-DPB11501 DPA10201-DPB11601 DPA10201-DPB11901 DPA10201-DPB13401 DPA10201-DPB15501 DPA10202-DPB10101 DPA10202-DPB10201 DPA10202-DPB10202 DPA10202-DPB10401 DPA10202-DPB10501 DPA10202-DPB110601 DPA10202-DPB11101 DPA10202-DPB11301 DPA10202-DPB11801 DPA10202-DPB11901 DPA10202-DPB13101 DPA10202-DPB13801; note = HLAs: DPA10202-DPB15501 DPA10202-DPB16501 DPA10301-DPB10101 DPA10301-DPB10201 DPA10301-DPB10202 DPA10301-DPB10401 DPA10301-DPB10402 DPA10301-DPB110501 DPA10301-DPB110601 DPA10301-DPB11101 DPA10301-DPB11301 DPA10301-DPB11801 DPA10301-DPB12301 DPA10301-DPB13901 DPA10301-DPB14001 DPA10301-DPB14901 DPA10301-DPB15501 DPA10301-DPB16501 DPA10301-DPB17501 DPA10301-DPB18001 DPA10401-DPB10101 DPA10401-DPB10201 DPA10401-DPB10202 DPA10401-DPB10402 DPA10401-DPB10501 DPA10401-DPB110501 DPA10401-DPB14901
KEPPILWHGFELFPDKWTVQ

SEQ ID NO: 6772 - protein, 14 aa, synthetic construct
  source 1..14: note = Seed: PPFLWMGYELHPDK; note = HLAs: DPA10103-DPB10101 DPA10103-DPB10201 DPA10103-DPB10202 DPA10103-DPB10401 DPA10103-DPB112601 DPA10103-DPB11501 DPA10103-DPB11601 DPA10103-DPB11901 DPA10103-DPB12301 DPA10103-DPB13101 DPA10103-DPB13401 DPA10103-DPB13901 DPA10103-DPB14001 DPA10103-DPB14101 DPA10103-DPB14801 DPA10103-DPB15001 DPA10103-DPB15901 DPA10104-DPB10101 DPA10104-DPB11501 DPA10105-DPB10101 DPA10105-DPB10401 DPA10105-DPB15001 DPA10106-DPB10101 DPA10201-DPB10101 DPA10201-DPB110601 DPA10201-DPB11501 DPA10201-DPB11601 DPA10201-DPB11901 DPA10202-DPB10101 DPA10202-DPB10201 DPA10202-DPB10202 DPA10202-DPB10401 DPA10202-DPB110601 DPA10202-DPB11901 DPA10202-DPB13101 DPA10202-DPB16501 DPA10301-DPB10101 DPA10301-DPB10201 DPA10301-DPB10202 DPA10301-DPB10401 DPA10301-DPB10402 DPA10301-DPB110501 DPA10301-DPB110601 DPA10301-DPB11801 DPA10301-DPB12301 DPA10301-DPB13901 DPA10301-DPB14001 DPA10301-DPB14901 DPA10301-DPB15501 DPA10301-DPB16501 DPA10301-DPB17501 DPA10301-DPB18001 DPA10401-DPB10101 DPA10401-DPB10201; note = HLAs: DPA10401-DPB10202 DPA10401-DPB10402 DPA10401-DPB10501 DPA10401-DPB110501 DPA10401-DPB14901
PPFLWSGFELRPDK

SEQ ID NO: 6773 - protein, 20 aa, synthetic construct
  source 1..20: note = Seed: KEPPFLWMGYELHPDKWTVQ; note = HLAs: DRB1_0101 DRB1_1001 DPA10103-DPB10101 DPA10103-DPB10201 DPA10103-DPB10202 DPA10103-DPB10401 DPA10103-DPB10402 DPA10103-DPB10501 DPA10103-DPB110501 DPA10103-DPB112601 DPA10103-DPB11501 DPA10103-DPB11601 DPA10103-DPB11801 DPA10103-DPB11901 DPA10103-DPB12301 DPA10103-DPB13101 DPA10103-DPB13401 DPA10103-DPB13901 DPA10103-DPB14001 DPA10103-DPB14101 DPA10103-DPB14801 DPA10103-DPB14901 DPA10103-DPB15001 DPA10103-DPB15101 DPA10103-DPB15501 DPA10103-DPB15901 DPA10103-DPB18001 DPA10104-DPB10101 DPA10104-DPB11501 DPA10105-DPB10101 DPA10105-DPB10401 DPA10105-DPB11801 DPA10105-DPB15001 DPA10106-DPB10101 DPA10201-DPB10101 DPA10201-DPB10201 DPA10201-DPB10202 DPA10201-DPB10401 DPA10201-DPB10501 DPA10201-DPB110601 DPA10201-DPB11501 DPA10201-DPB11601 DPA10201-DPB11901 DPA10201-DPB13401 DPA10201-DPB15501 DPA10202-DPB10101 DPA10202-DPB10201 DPA10202-DPB10202 DPA10202-DPB10401 DPA10202-DPB10501 DPA10202-DPB110601 DPA10202-DPB11101 DPA10202-DPB11301 DPA10202-DPB11801 DPA10202-DPB11901; note = HLAs: DPA10202-DPB13101 DPA10202-DPB13801 DPA10202-DPB15501 DPA10202-DPB16501 DPA10301-DPB10101 DPA10301-DPB10201 DPA10301-DPB10202 DPA10301-DPB10401 DPA10301-DPB10402 DPA10301-DPB110501 DPA10301-DPB110601 DPA10301-DPB11101 DPA10301-DPB11301 DPA10301-DPB11801 DPA10301-DPB12301 DPA10301-DPB13901 DPA10301-DPB14001 DPA10301-DPB14901 DPA10301-DPB15501 DPA10301-DPB16501 DPA10301-DPB17501 DPA10301-DPB18001 DPA10401-DPB10101 DPA10401-DPB10201 DPA10401-DPB10202 DPA10401-DPB10402 DPA10401-DPB10501 DPA10401-DPB110501 DPA10401-DPB14901
KEPPYLWMGFELIPDKWTVQ

SEQ ID NO: 6774 - protein, 20 aa, synthetic construct
  source 1..20: note = Seed: KEPPFLWMGYELHPDKWTVQ; note = HLAs: DPA10103-DPB10101 DPA10103-DPB10201 DPA10103-DPB10202 DPA10103-DPB10401 DPA10103-DPB10402 DPA10103-DPB10501 DPA10103-DPB110501 DPA10103-DPB112601 DPA10103-DPB11501 DPA10103-DPB11601 DPA10103-DPB11801 DPA10103-DPB11901 DPA10103-DPB12301 DPA10103-DPB13101 DPA10103-DPB13401 DPA10103-DPB13901 DPA10103-DPB14001 DPA10103-DPB14101 DPA10103-DPB14801 DPA10103-DPB14901 DPA10103-DPB15001 DPA10103-DPB15101 DPA10103-DPB15501 DPA10103-DPB15901 DPA10103-DPB18001 DPA10104-DPB10101 DPA10104-DPB11501 DPA10105-DPB10101 DPA10105-DPB10401 DPA10105-DPB11801 DPA10105-DPB15001 DPA10106-DPB10101 DPA10201-DPB10101 DPA10201-DPB10201 DPA10201-DPB10202 DPA10201-DPB10401 DPA10201-DPB10501 DPA10201-DPB110601 DPA10201-DPB11501 DPA10201-DPB11601 DPA10201-DPB11901 DPA10201-DPB13401 DPA10201-DPB15501 DPA10202-DPB10101 DPA10202-DPB10201 DPA10202-DPB10202 DPA10202-DPB10401 DPA10202-DPB10501 DPA10202-DPB110601 DPA10202-DPB11101 DPA10202-DPB11301 DPA10202-DPB11801 DPA10202-DPB11901 DPA10202-DPB13101 DPA10202-DPB13801; note = HLAs: DPA10202-DPB15501 DPA10202-DPB16501 DPA10301-DPB10101 DPA10301-DPB10201 DPA10301-DPB10202 DPA10301-DPB10401 DPA10301-DPB10402 DPA10301-DPB110501 DPA10301-DPB110601 DPA10301-DPB11101 DPA10301-DPB11301 DPA10301-DPB11801 DPA10301-DPB12301 DPA10301-DPB13901 DPA10301-DPB14001 DPA10301-DPB14901 DPA10301-DPB15501 DPA10301-DPB16501 DPA10301-DPB17501 DPA10301-DPB18001 DPA10401-DPB10101 DPA10401-DPB10201 DPA10401-DPB10202 DPA10401-DPB10402 DPA10401-DPB10501 DPA10401-DPB110501 DPA10401-DPB14901
KEPPILWSGFELYPDKWTVQ

SEQ ID NO: 6775 - protein, 20 aa, synthetic construct
  source 1..20: note = Seed: KEPPFLWMGYELHPDKWTVQ; note = HLAs: DRB1_0101 DPA10103-DPB10101 DPA10103-DPB10201 DPA10103-DPB10202 DPA10103-DPB10401 DPA10103-DPB10402 DPA10103-DPB10501 DPA10103-DPB110501 DPA10103-DPB112601 DPA10103-DPB11501 DPA10103-DPB11601 DPA10103-DPB11801 DPA10103-DPB11901 DPA10103-DPB12301 DPA10103-DPB13101 DPA10103-DPB13401 DPA10103-DPB13901 DPA10103-DPB14001 DPA10103-DPB14101 DPA10103-DPB14801 DPA10103-DPB14901 DPA10103-DPB15001 DPA10103-DPB15101 DPA10103-DPB15501 DPA10103-DPB15901 DPA10103-DPB18001 DPA10104-DPB10101 DPA10104-DPB11501 DPA10105-DPB10101 DPA10105-DPB10401 DPA10105-DPB11801 DPA10105-DPB15001 DPA10106-DPB10101 DPA10201-DPB10101 DPA10201-DPB10201 DPA10201-DPB10202 DPA10201-DPB10401 DPA10201-DPB10501 DPA10201-DPB110601 DPA10201-DPB11501 DPA10201-DPB11601 DPA10201-DPB11901 DPA10201-DPB13401 DPA10201-DPB15501 DPA10202-DPB10101 DPA10202-DPB10201 DPA10202-DPB10202 DPA10202-DPB10401 DPA10202-DPB10501 DPA10202-DPB110601 DPA10202-DPB11101 DPA10202-DPB11301 DPA10202-DPB11801 DPA10202-DPB11901 DPA10202-DPB13101; note = HLAs: DPA10202-DPB13801 DPA10202-DPB15501 DPA10202-DPB16501 DPA10301-DPB10101 DPA10301-DPB10201 DPA10301-DPB10202 DPA10301-DPB10401 DPA10301-DPB10402 DPA10301-DPB110501 DPA10301-DPB110601 DPA10301-DPB11101 DPA10301-DPB11301 DPA10301-DPB11801 DPA10301-DPB12301 DPA10301-DPB13901 DPA10301-DPB14001 DPA10301-DPB14901 DPA10301-DPB15501 DPA10301-DPB16501 DPA10301-DPB17501 DPA10301-DPB18001 DPA10401-DPB10101 DPA10401-DPB10201 DPA10401-DPB10202 DPA10401-DPB10402 DPA10401-DPB10501 DPA10401-DPB110501 DPA10401-DPB14901
KEPPFLWFGFELHPDKWTVQ

SEQ ID NO: 6776 - protein, 20 aa, synthetic construct
  source 1..20: note = Seed: KEPPFLWMGYELHPDKWTVQ; note = HLAs: DPA10103-DPB10101 DPA10103-DPB10201 DPA10103-DPB10202 DPA10103-DPB10401 DPA10103-DPB10402 DPA10103-DPB10501 DPA10103-DPB110501 DPA10103-DPB112601 DPA10103-DPB11501 DPA10103-DPB11601 DPA10103-DPB11801 DPA10103-DPB11901 DPA10103-DPB12301 DPA10103-DPB13101 DPA10103-DPB13401 DPA10103-DPB13901 DPA10103-DPB14001 DPA10103-DPB14101 DPA10103-DPB14801 DPA10103-DPB14901 DPA10103-DPB15001 DPA10103-DPB15101 DPA10103-DPB15501 DPA10103-DPB15901 DPA10103-DPB18001 DPA10104-DPB10101 DPA10104-DPB11501 DPA10105-DPB10101 DPA10105-DPB10401 DPA10105-DPB11801 DPA10105-DPB15001 DPA10106-DPB10101 DPA10201-DPB10101 DPA10201-DPB10201 DPA10201-DPB10202 DPA10201-DPB10401 DPA10201-DPB10501 DPA10201-DPB110601 DPA10201-DPB11501 DPA10201-DPB11601 DPA10201-DPB11901 DPA10201-DPB13401 DPA10201-DPB15501 DPA10202-DPB10101 DPA10202-DPB10201 DPA10202-DPB10202 DPA10202-DPB10401 DPA10202-DPB10501 DPA10202-DPB110601 DPA10202-DPB11101 DPA10202-DPB11301 DPA10202-DPB11801 DPA10202-DPB11901 DPA10202-DPB13101 DPA10202-DPB13801; note = HLAs: DPA10202-DPB15501 DPA10202-DPB16501 DPA10301-DPB10101 DPA10301-DPB10201 DPA10301-DPB10202 DPA10301-DPB10401 DPA10301-DPB10402 DPA10301-DPB110501 DPA10301-DPB110601 DPA10301-DPB11101 DPA10301-DPB11301 DPA10301-DPB11801 DPA10301-DPB12301 DPA10301-DPB13901 DPA10301-DPB14001 DPA10301-DPB14901 DPA10301-DPB16501 DPA10301-DPB17501 DPA10301-DPB18001 DPA10401-DPB10101 DPA10401-DPB10201 DPA10401-DPB10202 DPA10401-DPB10402 DPA10401-DPB10501 DPA10401-DPB110501 DPA10401-DPB14901
KEPPLLWKGFELLPDKWTVQ

SEQ ID NO: 6777 - protein, 14 aa, synthetic construct
  source 1..14: note = Seed: PPFLWMGYELHPDK; note = HLAs: DRB1_1001 DPA10103-DPB10101 DPA10103-DPB10201 DPA10103-DPB10202 DPA10103-DPB10401 DPA10103-DPB112601 DPA10103-DPB11501 DPA10103-DPB11601 DPA10103-DPB11901 DPA10103-DPB12301 DPA10103-DPB13101 DPA10103-DPB13401 DPA10103-DPB13901 DPA10103-DPB14001 DPA10103-DPB14101 DPA10103-DPB14801 DPA10103-DPB15001 DPA10103-DPB15901 DPA10104-DPB10101 DPA10104-DPB11501 DPA10105-DPB10101 DPA10105-DPB10401 DPA10105-DPB15001 DPA10106-DPB10101 DPA10201-DPB10101 DPA10201-DPB110601 DPA10201-DPB11501 DPA10201-DPB11601 DPA10201-DPB11901 DPA10202-DPB10101 DPA10202-DPB10201 DPA10202-DPB10202 DPA10202-DPB10401 DPA10202-DPB110601 DPA10202-DPB11901 DPA10202-DPB13101 DPA10202-DPB16501 DPA10301-DPB10101 DPA10301-DPB10201 DPA10301-DPB10202 DPA10301-DPB10401 DPA10301-DPB10402 DPA10301-DPB110501 DPA10301-DPB110601 DPA10301-DPB11801 DPA10301-DPB12301 DPA10301-DPB13901 DPA10301-DPB14001 DPA10301-DPB14901 DPA10301-DPB15501 DPA10301-DPB16501 DPA10301-DPB17501 DPA10301-DPB18001 DPA10401-DPB10101 DPA10401-DPB10201; note = HLAs: DPA10401-DPB10202 DPA10401-DPB10402 DPA10401-DPB10501 DPA10401-DPB110501 DPA10401-DPB14901
PPFLWEGIELIPDK

SEQ ID NO: 6778 - protein, 20 aa, synthetic construct
  source 1..20: note = Seed: KEPPFLWMGYELHPDKWTVQ; note = HLAs: DRB1_0101 DPA10103-DPB10101 DPA10103-DPB10201 DPA10103-DPB10202 DPA10103-DPB10401 DPA10103-DPB10402 DPA10103-DPB10501 DPA10103-DPB110501 DPA10103-DPB112601 DPA10103-DPB11501 DPA10103-DPB11601 DPA10103-DPB11801 DPA10103-DPB11901 DPA10103-DPB12301 DPA10103-DPB13101 DPA10103-DPB13401 DPA10103-DPB13901 DPA10103-DPB14001 DPA10103-DPB14101 DPA10103-DPB14801 DPA10103-DPB14901 DPA10103-DPB15001 DPA10103-DPB15101 DPA10103-DPB15501 DPA10103-DPB15901 DPA10103-DPB18001 DPA10104-DPB10101 DPA10104-DPB11501 DPA10105-DPB10101 DPA10105-DPB10401 DPA10105-DPB11801 DPA10105-DPB15001 DPA10106-DPB10101 DPA10201-DPB10101 DPA10201-DPB10201 DPA10201-DPB10202 DPA10201-DPB10401 DPA10201-DPB10501 DPA10201-DPB110601 DPA10201-DPB11501 DPA10201-DPB11601 DPA10201-DPB11901 DPA10201-DPB13401 DPA10201-DPB15501 DPA10202-DPB10101 DPA10202-DPB10201 DPA10202-DPB10202 DPA10202-DPB10401 DPA10202-DPB10501 DPA10202-DPB110601 DPA10202-DPB11101 DPA10202-DPB11301 DPA10202-DPB11801 DPA10202-DPB11901 DPA10202-DPB13101; note = HLAs: DPA10202-DPB13801 DPA10202-DPB15501 DPA10202-DPB16501 DPA10301-DPB10101 DPA10301-DPB10201 DPA10301-DPB10202 DPA10301-DPB10401 DPA10301-DPB10402 DPA10301-DPB110501 DPA10301-DPB110601 DPA10301-DPB11101 DPA10301-DPB11301 DPA10301-DPB11801 DPA10301-DPB12301 DPA10301-DPB13901 DPA10301-DPB14001 DPA10301-DPB14901 DPA10301-DPB15501 DPA10301-DPB16501 DPA10301-DPB17501 DPA10301-DPB18001 DPA10401-DPB10101 DPA10401-DPB10201 DPA10401-DPB10202 DPA10401-DPB10402 DPA10401-DPB10501 DPA10401-DPB110501 DPA10401-DPB14901
KEPPFLWFGFELNPDKWTVQ

SEQ ID NO: 6779 - protein, 14 aa, synthetic construct
  source 1..14: note = Seed: PPFLWMGYELHPDK; note = HLAs: DRB1_1001 DPA10103-DPB10101 DPA10103-DPB10201 DPA10103-DPB10202 DPA10103-DPB10401 DPA10103-DPB112601 DPA10103-DPB11501 DPA10103-DPB11601 DPA10103-DPB11901 DPA10103-DPB12301 DPA10103-DPB13101 DPA10103-DPB13401 DPA10103-DPB13901 DPA10103-DPB14001 DPA10103-DPB14101 DPA10103-DPB14801 DPA10103-DPB15001 DPA10103-DPB15901 DPA10104-DPB10101 DPA10104-DPB11501 DPA10105-DPB10101 DPA10105-DPB10401 DPA10105-DPB15001 DPA10106-DPB10101 DPA10201-DPB10101 DPA10201-DPB110601 DPA10201-DPB11501 DPA10201-DPB11601 DPA10201-DPB11901 DPA10202-DPB10101 DPA10202-DPB10201 DPA10202-DPB10202 DPA10202-DPB10401 DPA10202-DPB110601 DPA10202-DPB11901 DPA10202-DPB13101 DPA10202-DPB16501 DPA10301-DPB10101 DPA10301-DPB10201 DPA10301-DPB10202 DPA10301-DPB10401 DPA10301-DPB10402 DPA10301-DPB110501 DPA10301-DPB110601 DPA10301-DPB11801 DPA10301-DPB12301 DPA10301-DPB13901 DPA10301-DPB14001 DPA10301-DPB14901 DPA10301-DPB15501 DPA10301-DPB16501 DPA10301-DPB17501 DPA10301-DPB18001 DPA10401-DPB10101 DPA10401-DPB10201; note = HLAs: DPA10401-DPB10202 DPA10401-DPB10402 DPA10401-DPB10501 DPA10401-DPB110501 DPA10401-DPB14901
PPFLWSGLELMPDK

SEQ ID NO: 6780 - protein, 14 aa, synthetic construct
  source 1..14: note = Seed: PPFLWMGYELHPDK; note = HLAs: DPA10103-DPB10101 DPA10103-DPB10201 DPA10103-DPB10202 DPA10103-DPB10401 DPA10103-DPB112601 DPA10103-DPB11501 DPA10103-DPB11601 DPA10103-DPB11901 DPA10103-DPB12301 DPA10103-DPB13101 DPA10103-DPB13401 DPA10103-DPB13901 DPA10103-DPB14001 DPA10103-DPB14101 DPA10103-DPB14801 DPA10103-DPB15001 DPA10103-DPB15901 DPA10104-DPB10101 DPA10104-DPB11501 DPA10105-DPB10101 DPA10105-DPB10401 DPA10105-DPB15001 DPA10106-DPB10101 DPA10201-DPB10101 DPA10201-DPB110601 DPA10201-DPB11501 DPA10201-DPB11601 DPA10201-DPB11901 DPA10202-DPB10101 DPA10202-DPB10201 DPA10202-DPB10202 DPA10202-DPB10401 DPA10202-DPB110601 DPA10202-DPB11901 DPA10202-DPB13101 DPA10202-DPB16501 DPA10301-DPB10101 DPA10301-DPB10201 DPA10301-DPB10202 DPA10301-DPB10401 DPA10301-DPB10402 DPA10301-DPB110501 DPA10301-DPB110601 DPA10301-DPB11801 DPA10301-DPB12301 DPA10301-DPB13901 DPA10301-DPB14001 DPA10301-DPB14901 DPA10301-DPB15501 DPA10301-DPB16501 DPA10301-DPB17501 DPA10301-DPB18001 DPA10401-DPB10101 DPA10401-DPB10201; note = HLAs: DPA10401-DPB10202 DPA10401-DPB10402 DPA10401-DPB10501 DPA10401-DPB110501 DPA10401-DPB14901
PPFLWFGFELEPDK

SEQ ID NO: 6781 - protein, 14 aa, synthetic construct
  source 1..14: note = Seed: PPFLWMGYELHPDK; note = HLAs: DPA10103-DPB10101 DPA10103-DPB10201 DPA10103-DPB10202 DPA10103-DPB10401 DPA10103-DPB112601 DPA10103-DPB11501 DPA10103-DPB11601 DPA10103-DPB11901 DPA10103-DPB12301 DPA10103-DPB13101 DPA10103-DPB13401 DPA10103-DPB13901 DPA10103-DPB14001 DPA10103-DPB14101 DPA10103-DPB14801 DPA10103-DPB15001 DPA10103-DPB15901 DPA10104-DPB10101 DPA10104-DPB11501 DPA10105-DPB10101 DPA10105-DPB10401 DPA10105-DPB15001 DPA10106-DPB10101 DPA10201-DPB10101 DPA10201-DPB110601 DPA10201-DPB11501 DPA10201-DPB11601 DPA10201-DPB11901 DPA10202-DPB10101 DPA10202-DPB10201 DPA10202-DPB10202 DPA10202-DPB10401 DPA10202-DPB110601 DPA10202-DPB11901 DPA10202-DPB13101 DPA10202-DPB16501 DPA10301-DPB10101 DPA10301-DPB10201 DPA10301-DPB10202 DPA10301-DPB10401 DPA10301-DPB10402 DPA10301-DPB110501 DPA10301-DPB110601 DPA10301-DPB11801 DPA10301-DPB12301 DPA10301-DPB13901 DPA10301-DPB14001 DPA10301-DPB14901 DPA10301-DPB15501 DPA10301-DPB16501 DPA10301-DPB17501 DPA10301-DPB18001 DPA10401-DPB10101 DPA10401-DPB10201; note = HLAs: DPA10401-DPB10202 DPA10401-DPB10402 DPA10401-DPB10501 DPA10401-DPB110501 DPA10401-DPB14901
PPYLWVGFELYPDK

SEQ ID NO: 6782 - protein, 14 aa, synthetic construct
  source 1..14: note = Seed: PPFLWMGYELHPDK; note = HLAs: DPA10103-DPB10101 DPA10103-DPB10201 DPA10103-DPB10202 DPA10103-DPB10401 DPA10103-DPB112601 DPA10103-DPB11501 DPA10103-DPB11601 DPA10103-DPB11901 DPA10103-DPB12301 DPA10103-DPB13101 DPA10103-DPB13401 DPA10103-DPB13901 DPA10103-DPB14001 DPA10103-DPB14101 DPA10103-DPB14801 DPA10103-DPB15001 DPA10103-DPB15901 DPA10104-DPB10101 DPA10104-DPB11501 DPA10105-DPB10101 DPA10105-DPB10401 DPA10105-DPB15001 DPA10106-DPB10101 DPA10201-DPB10101 DPA10201-DPB110601 DPA10201-DPB11501 DPA10201-DPB11601 DPA10201-DPB11901 DPA10202-DPB10101 DPA10202-DPB10201 DPA10202-DPB10202 DPA10202-DPB10401 DPA10202-DPB110601 DPA10202-DPB11901 DPA10202-DPB13101 DPA10202-DPB16501 DPA10301-DPB10101 DPA10301-DPB10201 DPA10301-DPB10202 DPA10301-DPB10401 DPA10301-DPB10402 DPA10301-DPB110501 DPA10301-DPB110601 DPA10301-DPB11801 DPA10301-DPB12301 DPA10301-DPB13901 DPA10301-DPB14001 DPA10301-DPB14901 DPA10301-DPB15501 DPA10301-DPB16501 DPA10301-DPB17501 DPA10301-DPB18001 DPA10401-DPB10101 DPA10401-DPB10201; note = HLAs: DPA10401-DPB10202 DPA10401-DPB10402 DPA10401-DPB10501 DPA10401-DPB110501 DPA10401-DPB14901
PPFLWEGFELQPDK

SEQ ID NO: 6783 - protein, 14 aa, synthetic construct
  source 1..14: note = Seed: PPFLWMGYELHPDK; note = HLAs: DPA10103-DPB10101 DPA10103-DPB10201 DPA10103-DPB10202 DPA10103-DPB10401 DPA10103-DPB112601 DPA10103-DPB11501 DPA10103-DPB11601 DPA10103-DPB11901 DPA10103-DPB12301 DPA10103-DPB13101 DPA10103-DPB13401 DPA10103-DPB13901 DPA10103-DPB14001 DPA10103-DPB14101 DPA10103-DPB14801 DPA10103-DPB15001 DPA10103-DPB15901 DPA10104-DPB10101 DPA10104-DPB11501 DPA10105-DPB10101 DPA10105-DPB10401 DPA10105-DPB15001 DPA10106-DPB10101 DPA10201-DPB10101 DPA10201-DPB110601 DPA10201-DPB11501 DPA10201-DPB11601 DPA10201-DPB11901 DPA10202-DPB10101 DPA10202-DPB10201 DPA10202-DPB10202 DPA10202-DPB10401 DPA10202-DPB110601 DPA10202-DPB11901 DPA10202-DPB13101 DPA10202-DPB16501 DPA10301-DPB10101 DPA10301-DPB10201 DPA10301-DPB10202 DPA10301-DPB10401 DPA10301-DPB10402 DPA10301-DPB110501 DPA10301-DPB110601 DPA10301-DPB11801 DPA10301-DPB12301 DPA10301-DPB13901 DPA10301-DPB14001 DPA10301-DPB14901 DPA10301-DPB15501 DPA10301-DPB16501 DPA10301-DPB17501 DPA10301-DPB18001 DPA10401-DPB10101 DPA10401-DPB10201; note = HLAs: DPA10401-DPB10202 DPA10401-DPB10402 DPA10401-DPB10501 DPA10401-DPB110501 DPA10401-DPB14901
PPFLWHGFELQPDK

SEQ ID NO: 6784 - protein, 14 aa, synthetic construct
  source 1..14: note = Seed: PPFLWMGYELHPDK; note = HLAs: DPA10103-DPB10101 DPA10103-DPB10201 DPA10103-DPB10202 DPA10103-DPB10401 DPA10103-DPB112601 DPA10103-DPB11501 DPA10103-DPB11601 DPA10103-DPB11901 DPA10103-DPB12301 DPA10103-DPB13101 DPA10103-DPB13401 DPA10103-DPB13901 DPA10103-DPB14001 DPA10103-DPB14101 DPA10103-DPB14801 DPA10103-DPB15001 DPA10103-DPB15901 DPA10104-DPB10101 DPA10104-DPB11501 DPA10105-DPB10101 DPA10105-DPB10401 DPA10105-DPB15001 DPA10106-DPB10101 DPA10201-DPB10101 DPA10201-DPB110601 DPA10201-DPB11501 DPA10201-DPB11601 DPA10201-DPB11901 DPA10202-DPB10101 DPA10202-DPB10201 DPA10202-DPB10202 DPA10202-DPB10401 DPA10202-DPB110601 DPA10202-DPB11901 DPA10202-DPB13101 DPA10202-DPB16501 DPA10301-DPB10101 DPA10301-DPB10201 DPA10301-DPB10202 DPA10301-DPB10401 DPA10301-DPB10402 DPA10301-DPB110501 DPA10301-DPB110601 DPA10301-DPB11801 DPA10301-DPB12301 DPA10301-DPB13901 DPA10301-DPB14001 DPA10301-DPB14901 DPA10301-DPB16501 DPA10301-DPB17501 DPA10301-DPB18001 DPA10401-DPB10101 DPA10401-DPB10201 DPA10401-DPB10202; note = HLAs: DPA10401-DPB10402 DPA10401-DPB10501 DPA10401-DPB110501 DPA10401-DPB14901
PPVLWQGFELLPDK

SEQ ID NO: 6785 - protein, 14 aa, synthetic construct
  source 1..14: note = Seed: PPFLWMGYELHPDK; note = HLAs: DPA10103-DPB10101 DPA10103-DPB10201 DPA10103-DPB10202 DPA10103-DPB10401 DPA10103-DPB112601 DPA10103-DPB11501 DPA10103-DPB11601 DPA10103-DPB11901 DPA10103-DPB12301 DPA10103-DPB13101 DPA10103-DPB13401 DPA10103-DPB13901 DPA10103-DPB14001 DPA10103-DPB14101 DPA10103-DPB14801 DPA10103-DPB15001 DPA10103-DPB15901 DPA10104-DPB10101 DPA10104-DPB11501 DPA10105-DPB10101 DPA10105-DPB10401 DPA10105-DPB15001 DPA10106-DPB10101 DPA10201-DPB10101 DPA10201-DPB110601 DPA10201-DPB11501 DPA10201-DPB11601 DPA10201-DPB11901 DPA10202-DPB10101 DPA10202-DPB10201 DPA10202-DPB10202 DPA10202-DPB10401 DPA10202-DPB110601 DPA10202-DPB11901 DPA10202-DPB13101 DPA10202-DPB16501 DPA10301-DPB10101 DPA10301-DPB10201 DPA10301-DPB10202 DPA10301-DPB10401 DPA10301-DPB10402 DPA10301-DPB110501 DPA10301-DPB110601 DPA10301-DPB11801 DPA10301-DPB12301 DPA10301-DPB13901 DPA10301-DPB14001 DPA10301-DPB14901 DPA10301-DPB15501 DPA10301-DPB16501 DPA10301-DPB17501 DPA10301-DPB18001 DPA10401-DPB10101 DPA10401-DPB10201; note = HLAs: DPA10401-DPB10202 DPA10401-DPB10402 DPA10401-DPB10501 DPA10401-DPB110501 DPA10401-DPB14901
PPFLWNGYELIPDK

SEQ ID NO: 6786 - protein, 20 aa, synthetic construct
  source 1..20: note = Seed: KEPPFLWMGYELHPDKWTVQ; note = HLAs: DRB1_0101 DPA10103-DPB10101 DPA10103-DPB10201 DPA10103-DPB10202 DPA10103-DPB10401 DPA10103-DPB10402 DPA10103-DPB10501 DPA10103-DPB110501 DPA10103-DPB112601 DPA10103-DPB11501 DPA10103-DPB11601 DPA10103-DPB11801 DPA10103-DPB11901 DPA10103-DPB12301 DPA10103-DPB13101 DPA10103-DPB13401 DPA10103-DPB13901 DPA10103-DPB14001 DPA10103-DPB14101 DPA10103-DPB14801 DPA10103-DPB14901 DPA10103-DPB15001 DPA10103-DPB15101 DPA10103-DPB15501 DPA10103-DPB15901 DPA10103-DPB18001 DPA10104-DPB10101 DPA10104-DPB11501 DPA10105-DPB10101 DPA10105-DPB10401 DPA10105-DPB11801 DPA10105-DPB15001 DPA10106-DPB10101 DPA10201-DPB10101 DPA10201-DPB10201 DPA10201-DPB10202 DPA10201-DPB10401 DPA10201-DPB10501 DPA10201-DPB110601 DPA10201-DPB11501 DPA10201-DPB11601 DPA10201-DPB11901 DPA10201-DPB13401 DPA10201-DPB15501 DPA10202-DPB10101 DPA10202-DPB10201 DPA10202-DPB10202 DPA10202-DPB10401 DPA10202-DPB10501 DPA10202-DPB110601 DPA10202-DPB11101 DPA10202-DPB11301 DPA10202-DPB11801 DPA10202-DPB11901 DPA10202-DPB13101; note = HLAs: DPA10202-DPB13801 DPA10202-DPB15501 DPA10202-DPB16501 DPA10301-DPB10101 DPA10301-DPB10201 DPA10301-DPB10202 DPA10301-DPB10401 DPA10301-DPB10402 DPA10301-DPB110501 DPA10301-DPB110601 DPA10301-DPB11101 DPA10301-DPB11301 DPA10301-DPB11801 DPA10301-DPB12301 DPA10301-DPB13901 DPA10301-DPB14001 DPA10301-DPB14901 DPA10301-DPB15501 DPA10301-DPB16501 DPA10301-DPB17501 DPA10301-DPB18001 DPA10401-DPB10101 DPA10401-DPB10201 DPA10401-DPB10202 DPA10401-DPB10402 DPA10401-DPB10501 DPA10401-DPB110501 DPA10401-DPB14901
KEPPFLWFGFELAPDKWTVQ

SEQ ID NO: 6787 - protein, 14 aa, synthetic construct
  source 1..14: note = Seed: PPFLWMGYELHPDK; note = HLAs: DRB1_1001 DPA10103-DPB10101 DPA10103-DPB10201 DPA10103-DPB10202 DPA10103-DPB10401 DPA10103-DPB112601 DPA10103-DPB11501 DPA10103-DPB11601 DPA10103-DPB11901 DPA10103-DPB12301 DPA10103-DPB13101 DPA10103-DPB13401 DPA10103-DPB13901 DPA10103-DPB14001 DPA10103-DPB14101 DPA10103-DPB14801 DPA10103-DPB15001 DPA10103-DPB15901 DPA10104-DPB10101 DPA10104-DPB11501 DPA10105-DPB10101 DPA10105-DPB10401 DPA10105-DPB15001 DPA10106-DPB10101 DPA10201-DPB10101 DPA10201-DPB110601 DPA10201-DPB11501 DPA10201-DPB11601 DPA10201-DPB11901 DPA10202-DPB10101 DPA10202-DPB10201 DPA10202-DPB10202 DPA10202-DPB10401 DPA10202-DPB110601 DPA10202-DPB11901 DPA10202-DPB13101 DPA10202-DPB16501 DPA10301-DPB10101 DPA10301-DPB10201 DPA10301-DPB10202 DPA10301-DPB10401 DPA10301-DPB10402 DPA10301-DPB110501 DPA10301-DPB110601 DPA10301-DPB11801 DPA10301-DPB12301 DPA10301-DPB13901 DPA10301-DPB14001 DPA10301-DPB14901 DPA10301-DPB15501 DPA10301-DPB16501 DPA10301-DPB17501 DPA10301-DPB18001 DPA10401-DPB10101 DPA10401-DPB10201; note = HLAs: DPA10401-DPB10202 DPA10401-DPB10402 DPA10401-DPB10501 DPA10401-DPB110501 DPA10401-DPB14901
PPFLWMGYELFPDK

SEQ ID NO: 6788 - protein, 20 aa, synthetic construct
  source 1..20: note = Seed: KEPPFLWMGYELHPDKWTVQ; note = HLAs: DPA10103-DPB10101 DPA10103-DPB10201 DPA10103-DPB10202 DPA10103-DPB10401 DPA10103-DPB10402 DPA10103-DPB10501 DPA10103-DPB110501 DPA10103-DPB112601 DPA10103-DPB11501 DPA10103-DPB11601 DPA10103-DPB11801 DPA10103-DPB11901 DPA10103-DPB12301 DPA10103-DPB13101 DPA10103-DPB13401 DPA10103-DPB13901 DPA10103-DPB14001 DPA10103-DPB14101 DPA10103-DPB14801 DPA10103-DPB14901 DPA10103-DPB15001 DPA10103-DPB15101 DPA10103-DPB15501 DPA10103-DPB15901 DPA10103-DPB18001 DPA10104-DPB10101 DPA10104-DPB11501 DPA10105-DPB10101 DPA10105-DPB10401 DPA10105-DPB11801 DPA10105-DPB15001 DPA10106-DPB10101 DPA10201-DPB10101 DPA10201-DPB10201 DPA10201-DPB10202 DPA10201-DPB10401 DPA10201-DPB10501 DPA10201-DPB110601 DPA10201-DPB11501 DPA10201-DPB11601 DPA10201-DPB11901 DPA10201-DPB13401 DPA10201-DPB15501 DPA10202-DPB10101 DPA10202-DPB10201 DPA10202-DPB10202 DPA10202-DPB10401 DPA10202-DPB10501 DPA10202-DPB110601 DPA10202-DPB11301 DPA10202-DPB11801 DPA10202-DPB11901 DPA10202-DPB13101 DPA10202-DPB13801 DPA10202-DPB15501; note = HLAs: DPA10202-DPB16501 DPA10301-DPB10101 DPA10301-DPB10201 DPA10301-DPB10202 DPA10301-DPB10401 DPA10301-DPB10402 DPA10301-DPB110501 DPA10301-DPB110601 DPA10301-DPB11301 DPA10301-DPB11801 DPA10301-DPB12301 DPA10301-DPB13901 DPA10301-DPB14001 DPA10301-DPB14901 DPA10301-DPB16501 DPA10301-DPB17501 DPA10301-DPB18001 DPA10401-DPB10101 DPA10401-DPB10201 DPA10401-DPB10202 DPA10401-DPB10402 DPA10401-DPB10501 DPA10401-DPB110501 DPA10401-DPB14901
KEPPLLWHGFELAPDKWTVQ

SEQ ID NO: 6789 - protein, 14 aa, synthetic construct
  source 1..14: note = Seed: PPFLWMGYELHPDK; note = HLAs: DRB1_1001 DPA10103-DPB10101 DPA10103-DPB10201 DPA10103-DPB10202 DPA10103-DPB10401 DPA10103-DPB112601 DPA10103-DPB11501 DPA10103-DPB11601 DPA10103-DPB11901 DPA10103-DPB12301 DPA10103-DPB13101 DPA10103-DPB13401 DPA10103-DPB13901 DPA10103-DPB14001 DPA10103-DPB14101 DPA10103-DPB14801 DPA10103-DPB15001 DPA10103-DPB15901 DPA10104-DPB10101 DPA10104-DPB11501 DPA10105-DPB10101 DPA10105-DPB10401 DPA10105-DPB15001 DPA10106-DPB10101 DPA10201-DPB10101 DPA10201-DPB110601 DPA10201-DPB11501 DPA10201-DPB11601 DPA10201-DPB11901 DPA10202-DPB10101 DPA10202-DPB10201 DPA10202-DPB10202 DPA10202-DPB10401 DPA10202-DPB110601 DPA10202-DPB11901 DPA10202-DPB13101 DPA10202-DPB16501 DPA10301-DPB10101 DPA10301-DPB10201 DPA10301-DPB10202 DPA10301-DPB10401 DPA10301-DPB10402 DPA10301-DPB110501 DPA10301-DPB110601 DPA10301-DPB11801 DPA10301-DPB12301 DPA10301-DPB13901 DPA10301-DPB14001 DPA10301-DPB14901 DPA10301-DPB15501 DPA10301-DPB16501 DPA10301-DPB17501 DPA10301-DPB18001 DPA10401-DPB10101 DPA10401-DPB10201; note = HLAs: DPA10401-DPB10202 DPA10401-DPB10402 DPA10401-DPB10501 DPA10401-DPB110501 DPA10401-DPB14901
PPFLWQGFELNPDK

SEQ ID NO: 6790 - protein, 20 aa, synthetic construct
  source 1..20: note = Seed: KEPPFLWMGYELHPDKWTVQ; note = HLAs: DRB1_0101 DRB1_1001 DPA10103-DPB10101 DPA10103-DPB10201 DPA10103-DPB10202 DPA10103-DPB10401 DPA10103-DPB10402 DPA10103-DPB10501 DPA10103-DPB110501 DPA10103-DPB112601 DPA10103-DPB11501 DPA10103-DPB11601 DPA10103-DPB11801 DPA10103-DPB11901 DPA10103-DPB12301 DPA10103-DPB13101 DPA10103-DPB13401 DPA10103-DPB13901 DPA10103-DPB14001 DPA10103-DPB14101 DPA10103-DPB14801 DPA10103-DPB14901 DPA10103-DPB15001 DPA10103-DPB15101 DPA10103-DPB15501 DPA10103-DPB15901 DPA10103-DPB18001 DPA10104-DPB10101 DPA10104-DPB11501 DPA10105-DPB10101 DPA10105-DPB10401 DPA10105-DPB11801 DPA10105-DPB15001 DPA10106-DPB10101 DPA10201-DPB10101 DPA10201-DPB10201 DPA10201-DPB10202 DPA10201-DPB10401 DPA10201-DPB10501 DPA10201-DPB110601 DPA10201-DPB11501 DPA10201-DPB11601 DPA10201-DPB11901 DPA10201-DPB13401 DPA10201-DPB15501 DPA10202-DPB10101 DPA10202-DPB10201 DPA10202-DPB10202 DPA10202-DPB10401 DPA10202-DPB10501 DPA10202-DPB110601 DPA10202-DPB11101 DPA10202-DPB11301 DPA10202-DPB11801 DPA10202-DPB11901; note = HLAs: DPA10202-DPB13101 DPA10202-DPB13801 DPA10202-DPB15501 DPA10202-DPB16501 DPA10301-DPB10101 DPA10301-DPB10201 DPA10301-DPB10202 DPA10301-DPB10401 DPA10301-DPB10402 DPA10301-DPB110501 DPA10301-DPB110601 DPA10301-DPB11101 DPA10301-DPB11301 DPA10301-DPB11801 DPA10301-DPB12301 DPA10301-DPB13901 DPA10301-DPB14001 DPA10301-DPB14901 DPA10301-DPB15501 DPA10301-DPB16501 DPA10301-DPB17501 DPA10301-DPB18001 DPA10401-DPB10101 DPA10401-DPB10201 DPA10401-DPB10202 DPA10401-DPB10402 DPA10401-DPB10501 DPA10401-DPB110501 DPA10401-DPB14901
KEPPYLWIGFELAPDKWTVQ

SEQ ID NO: 6791 - protein, 14 aa, synthetic construct
  source 1..14: note = Seed: PPFLWMGYELHPDK; note = HLAs: DPA10103-DPB10101 DPA10103-DPB10201 DPA10103-DPB10202 DPA10103-DPB10401 DPA10103-DPB112601 DPA10103-DPB11501 DPA10103-DPB11601 DPA10103-DPB11901 DPA10103-DPB12301 DPA10103-DPB13101 DPA10103-DPB13401 DPA10103-DPB13901 DPA10103-DPB14001 DPA10103-DPB14101 DPA10103-DPB14801 DPA10103-DPB15901 DPA10104-DPB10101 DPA10104-DPB11501 DPA10105-DPB10101 DPA10105-DPB10401 DPA10106-DPB10101 DPA10201-DPB10101 DPA10201-DPB110601 DPA10201-DPB11501 DPA10201-DPB11601 DPA10201-DPB11901 DPA10202-DPB10101 DPA10202-DPB10201 DPA10202-DPB10202 DPA10202-DPB10401 DPA10202-DPB110601 DPA10202-DPB11901 DPA10202-DPB13101 DPA10202-DPB16501 DPA10301-DPB10101 DPA10301-DPB10201 DPA10301-DPB10202 DPA10301-DPB10401 DPA10301-DPB10402 DPA10301-DPB110501 DPA10301-DPB110601 DPA10301-DPB11801 DPA10301-DPB12301 DPA10301-DPB13901 DPA10301-DPB14001 DPA10301-DPB14901 DPA10301-DPB16501 DPA10301-DPB17501 DPA10301-DPB18001 DPA10401-DPB10101 DPA10401-DPB10201 DPA10401-DPB10202 DPA10401-DPB10402 DPA10401-DPB10501; note = HLAs: DPA10401-DPB110501 DPA10401-DPB14901
PPMLWFGFELLPDK

SEQ ID NO: 6792 - protein, 14 aa, synthetic construct
  source 1..14: note = Seed: PPFLWMGYELHPDK; note = HLAs: DPA10103-DPB10101 DPA10103-DPB10201 DPA10103-DPB10202 DPA10103-DPB10401 DPA10103-DPB112601 DPA10103-DPB11501 DPA10103-DPB11601 DPA10103-DPB11901 DPA10103-DPB12301 DPA10103-DPB13101 DPA10103-DPB13401 DPA10103-DPB13901 DPA10103-DPB14001 DPA10103-DPB14101 DPA10103-DPB14801 DPA10103-DPB15001 DPA10103-DPB15901 DPA10104-DPB10101 DPA10104-DPB11501 DPA10105-DPB10101 DPA10105-DPB10401 DPA10105-DPB15001 DPA10106-DPB10101 DPA10201-DPB10101 DPA10201-DPB110601 DPA10201-DPB11501 DPA10201-DPB11601 DPA10201-DPB11901 DPA10202-DPB10101 DPA10202-DPB10201 DPA10202-DPB10202 DPA10202-DPB10401 DPA10202-DPB110601 DPA10202-DPB11901 DPA10202-DPB13101 DPA10202-DPB16501 DPA10301-DPB10101 DPA10301-DPB10201 DPA10301-DPB10202 DPA10301-DPB10401 DPA10301-DPB10402 DPA10301-DPB110501 DPA10301-DPB110601 DPA10301-DPB11801 DPA10301-DPB12301 DPA10301-DPB13901 DPA10301-DPB14001 DPA10301-DPB14901 DPA10301-DPB15501 DPA10301-DPB16501 DPA10301-DPB17501 DPA10301-DPB18001 DPA10401-DPB10101 DPA10401-DPB10201; note = HLAs: DPA10401-DPB10202 DPA10401-DPB10402 DPA10401-DPB10501 DPA10401-DPB110501 DPA10401-DPB14901
PPFLWVGLELIPDK

SEQ ID NO: 6793 - protein, 14 aa, synthetic construct
  source 1..14: note = Seed: PPFLWMGYELHPDK; note = HLAs: DPA10103-DPB10101 DPA10103-DPB10201 DPA10103-DPB10202 DPA10103-DPB10401 DPA10103-DPB112601 DPA10103-DPB11501 DPA10103-DPB11601 DPA10103-DPB11901 DPA10103-DPB12301 DPA10103-DPB13101 DPA10103-DPB13401 DPA10103-DPB13901 DPA10103-DPB14001 DPA10103-DPB14101 DPA10103-DPB14801 DPA10103-DPB15001 DPA10103-DPB15901 DPA10104-DPB10101 DPA10104-DPB11501 DPA10105-DPB10101 DPA10105-DPB10401 DPA10105-DPB15001 DPA10106-DPB10101 DPA10201-DPB10101 DPA10201-DPB110601 DPA10201-DPB11501 DPA10201-DPB11601 DPA10201-DPB11901 DPA10202-DPB10101 DPA10202-DPB10201 DPA10202-DPB10202 DPA10202-DPB10401 DPA10202-DPB110601 DPA10202-DPB11901 DPA10202-DPB13101 DPA10202-DPB16501 DPA10301-DPB10101 DPA10301-DPB10201 DPA10301-DPB10202 DPA10301-DPB10401 DPA10301-DPB10402 DPA10301-DPB110501 DPA10301-DPB110601 DPA10301-DPB11801 DPA10301-DPB12301 DPA10301-DPB13901 DPA10301-DPB14001 DPA10301-DPB14901 DPA10301-DPB15501 DPA10301-DPB16501 DPA10301-DPB17501 DPA10301-DPB18001 DPA10401-DPB10101 DPA10401-DPB10201; note = HLAs: DPA10401-DPB10202 DPA10401-DPB10402 DPA10401-DPB10501 DPA10401-DPB110501 DPA10401-DPB14901
PPWLWEGFELMPDK

SEQ ID NO: 6794 - protein, 14 aa, synthetic construct
  source 1..14: note = Seed: PPFLWMGYELHPDK; note = HLAs: DPA10103-DPB10101 DPA10103-DPB10201 DPA10103-DPB10202 DPA10103-DPB10401 DPA10103-DPB112601 DPA10103-DPB11501 DPA10103-DPB11601 DPA10103-DPB11901 DPA10103-DPB12301 DPA10103-DPB13101 DPA10103-DPB13401 DPA10103-DPB13901 DPA10103-DPB14001 DPA10103-DPB14101 DPA10103-DPB14801 DPA10103-DPB15001 DPA10103-DPB15901 DPA10104-DPB10101 DPA10104-DPB11501 DPA10105-DPB10101 DPA10105-DPB10401 DPA10105-DPB15001 DPA10106-DPB10101 DPA10201-DPB10101 DPA10201-DPB110601 DPA10201-DPB11501 DPA10201-DPB11601 DPA10201-DPB11901 DPA10202-DPB10101 DPA10202-DPB10201 DPA10202-DPB10202 DPA10202-DPB10401 DPA10202-DPB110601 DPA10202-DPB11901 DPA10202-DPB13101 DPA10202-DPB16501 DPA10301-DPB10101 DPA10301-DPB10201 DPA10301-DPB10202 DPA10301-DPB10401 DPA10301-DPB10402 DPA10301-DPB110501 DPA10301-DPB110601 DPA10301-DPB11801 DPA10301-DPB12301 DPA10301-DPB13901 DPA10301-DPB14001 DPA10301-DPB14901 DPA10301-DPB16501 DPA10301-DPB17501 DPA10301-DPB18001 DPA10401-DPB10101 DPA10401-DPB10201 DPA10401-DPB10202; note = HLAs: DPA10401-DPB10402 DPA10401-DPB10501 DPA10401-DPB110501 DPA10401-DPB14901
PPLLWQGFELFPDK

SEQ ID NO: 6795 - protein, 14 aa, synthetic construct
  source 1..14: note = Seed: PPFLWMGYELHPDK; note = HLAs: DRB1_1001 DPA10103-DPB10101 DPA10103-DPB10201 DPA10103-DPB10202 DPA10103-DPB10401 DPA10103-DPB112601 DPA10103-DPB11501 DPA10103-DPB11601 DPA10103-DPB11901 DPA10103-DPB12301 DPA10103-DPB13101 DPA10103-DPB13401 DPA10103-DPB13901 DPA10103-DPB14001 DPA10103-DPB14101 DPA10103-DPB14801 DPA10103-DPB15001 DPA10103-DPB15901 DPA10104-DPB10101 DPA10104-DPB11501 DPA10105-DPB10101 DPA10105-DPB10401 DPA10105-DPB15001 DPA10106-DPB10101 DPA10201-DPB10101 DPA10201-DPB110601 DPA10201-DPB11501 DPA10201-DPB11601 DPA10201-DPB11901 DPA10202-DPB10101 DPA10202-DPB10201 DPA10202-DPB10202 DPA10202-DPB10401 DPA10202-DPB110601 DPA10202-DPB11901 DPA10202-DPB13101 DPA10202-DPB16501 DPA10301-DPB10101 DPA10301-DPB10201 DPA10301-DPB10202 DPA10301-DPB10401 DPA10301-DPB10402 DPA10301-DPB110501 DPA10301-DPB110601 DPA10301-DPB11801 DPA10301-DPB12301 DPA10301-DPB13901 DPA10301-DPB14001 DPA10301-DPB14901 DPA10301-DPB15501 DPA10301-DPB16501 DPA10301-DPB17501 DPA10301-DPB18001 DPA10401-DPB10101 DPA10401-DPB10201; note = HLAs: DPA10401-DPB10202 DPA10401-DPB10402 DPA10401-DPB10501 DPA10401-DPB110501 DPA10401-DPB14901
PPFLWIGIELVPDK

SEQ ID NO: 6796 - protein, 20 aa, synthetic construct
  source 1..20: note = Seed: KEPPFLWMGYELHPDKWTVQ; note = HLAs: DRB1_0101 DPA10103-DPB10101 DPA10103-DPB10201 DPA10103-DPB10202 DPA10103-DPB10401 DPA10103-DPB10402 DPA10103-DPB10501 DPA10103-DPB110501 DPA10103-DPB112601 DPA10103-DPB11501 DPA10103-DPB11601 DPA10103-DPB11801 DPA10103-DPB11901 DPA10103-DPB12301 DPA10103-DPB13101 DPA10103-DPB13401 DPA10103-DPB13901 DPA10103-DPB14001 DPA10103-DPB14101 DPA10103-DPB14801 DPA10103-DPB14901 DPA10103-DPB15001 DPA10103-DPB15101 DPA10103-DPB15501 DPA10103-DPB15901 DPA10103-DPB18001 DPA10104-DPB10101 DPA10104-DPB11501 DPA10105-DPB10101 DPA10105-DPB10401 DPA10105-DPB11801 DPA10105-DPB15001 DPA10106-DPB10101 DPA10201-DPB10101 DPA10201-DPB10201 DPA10201-DPB10202 DPA10201-DPB10401 DPA10201-DPB10501 DPA10201-DPB110601 DPA10201-DPB11501 DPA10201-DPB11601 DPA10201-DPB11901 DPA10201-DPB13401 DPA10201-DPB15501 DPA10202-DPB10101 DPA10202-DPB10201 DPA10202-DPB10202 DPA10202-DPB10401 DPA10202-DPB10501 DPA10202-DPB110601 DPA10202-DPB11101 DPA10202-DPB11301 DPA10202-DPB11801 DPA10202-DPB11901 DPA10202-DPB13101; note = HLAs: DPA10202-DPB13801 DPA10202-DPB15501 DPA10202-DPB16501 DPA10301-DPB10101 DPA10301-DPB10201 DPA10301-DPB10202 DPA10301-DPB10401 DPA10301-DPB10402 DPA10301-DPB110501 DPA10301-DPB110601 DPA10301-DPB11101 DPA10301-DPB11301 DPA10301-DPB11801 DPA10301-DPB12301 DPA10301-DPB13901 DPA10301-DPB14001 DPA10301-DPB14901 DPA10301-DPB15501 DPA10301-DPB16501 DPA10301-DPB17501 DPA10301-DPB18001 DPA10401-DPB10101 DPA10401-DPB10201 DPA10401-DPB10202 DPA10401-DPB10402 DPA10401-DPB10501 DPA10401-DPB110501 DPA10401-DPB14901
KEPPFLWNGLELIPDKWTVQ

SEQ ID NO: 6797 - protein, 20 aa, synthetic construct
  source 1..20: note = Seed: KEPPFLWMGYELHPDKWTVQ; note = HLAs: DPA10103-DPB10101 DPA10103-DPB10201 DPA10103-DPB10202 DPA10103-DPB10401 DPA10103-DPB10402 DPA10103-DPB10501 DPA10103-DPB110501 DPA10103-DPB112601 DPA10103-DPB11501 DPA10103-DPB11601 DPA10103-DPB11801 DPA10103-DPB11901 DPA10103-DPB12301 DPA10103-DPB13101 DPA10103-DPB13401 DPA10103-DPB13901 DPA10103-DPB14001 DPA10103-DPB14101 DPA10103-DPB14801 DPA10103-DPB14901 DPA10103-DPB15001 DPA10103-DPB15101 DPA10103-DPB15501 DPA10103-DPB15901 DPA10103-DPB18001 DPA10104-DPB10101 DPA10104-DPB11501 DPA10105-DPB10101 DPA10105-DPB10401 DPA10105-DPB11801 DPA10105-DPB15001 DPA10106-DPB10101 DPA10201-DPB10101 DPA10201-DPB10201 DPA10201-DPB10202 DPA10201-DPB10401 DPA10201-DPB10501 DPA10201-DPB110601 DPA10201-DPB11501 DPA10201-DPB11601 DPA10201-DPB11901 DPA10201-DPB13401 DPA10201-DPB15501 DPA10202-DPB10101 DPA10202-DPB10201 DPA10202-DPB10202 DPA10202-DPB10401 DPA10202-DPB10501 DPA10202-DPB110601 DPA10202-DPB11101 DPA10202-DPB11301 DPA10202-DPB11801 DPA10202-DPB11901 DPA10202-DPB13101 DPA10202-DPB13801; note = HLAs: DPA10202-DPB15501 DPA10202-DPB16501 DPA10301-DPB10101 DPA10301-DPB10201 DPA10301-DPB10202 DPA10301-DPB10401 DPA10301-DPB10402 DPA10301-DPB110501 DPA10301-DPB110601 DPA10301-DPB11101 DPA10301-DPB11301 DPA10301-DPB11801 DPA10301-DPB12301 DPA10301-DPB13901 DPA10301-DPB14001 DPA10301-DPB14901 DPA10301-DPB15501 DPA10301-DPB16501 DPA10301-DPB17501 DPA10301-DPB18001 DPA10401-DPB10101 DPA10401-DPB10201 DPA10401-DPB10202 DPA10401-DPB10402 DPA10401-DPB10501 DPA10401-DPB110501 DPA10401-DPB14901
KEPPILWEGFELMPDKWTVQ

SEQ ID NO: 6798 - protein, 20 aa, synthetic construct
  source 1..20: note = Seed: KEPPFLWMGYELHPDKWTVQ; note = HLAs: DPA10103-DPB10101 DPA10103-DPB10201 DPA10103-DPB10202 DPA10103-DPB10401 DPA10103-DPB10402 DPA10103-DPB10501 DPA10103-DPB110501 DPA10103-DPB112601 DPA10103-DPB11501 DPA10103-DPB11601 DPA10103-DPB11801 DPA10103-DPB11901 DPA10103-DPB12301 DPA10103-DPB13101 DPA10103-DPB13401 DPA10103-DPB13901 DPA10103-DPB14001 DPA10103-DPB14101 DPA10103-DPB14801 DPA10103-DPB14901 DPA10103-DPB15001 DPA10103-DPB15101 DPA10103-DPB15501 DPA10103-DPB15901 DPA10103-DPB18001 DPA10104-DPB10101 DPA10104-DPB11501 DPA10105-DPB10101 DPA10105-DPB10401 DPA10105-DPB11801 DPA10105-DPB15001 DPA10106-DPB10101 DPA10201-DPB10101 DPA10201-DPB10201 DPA10201-DPB10202 DPA10201-DPB10401 DPA10201-DPB10501 DPA10201-DPB110601 DPA10201-DPB11501 DPA10201-DPB11601 DPA10201-DPB11901 DPA10201-DPB13401 DPA10201-DPB15501 DPA10202-DPB10101 DPA10202-DPB10201 DPA10202-DPB10202 DPA10202-DPB10401 DPA10202-DPB10501 DPA10202-DPB110601 DPA10202-DPB11101 DPA10202-DPB11301 DPA10202-DPB11801 DPA10202-DPB11901 DPA10202-DPB13101 DPA10202-DPB13801; note = HLAs: DPA10202-DPB15501 DPA10202-DPB16501 DPA10301-DPB10101 DPA10301-DPB10201 DPA10301-DPB10202 DPA10301-DPB10401 DPA10301-DPB10402 DPA10301-DPB110501 DPA10301-DPB110601 DPA10301-DPB11101 DPA10301-DPB11301 DPA10301-DPB11801 DPA10301-DPB12301 DPA10301-DPB13901 DPA10301-DPB14001 DPA10301-DPB14901 DPA10301-DPB15501 DPA10301-DPB16501 DPA10301-DPB17501 DPA10301-DPB18001 DPA10401-DPB10101 DPA10401-DPB10201 DPA10401-DPB10202 DPA10401-DPB10402 DPA10401-DPB10501 DPA10401-DPB110501 DPA10401-DPB14901
KEPPFLWYGFELMPDKWTVQ

SEQ ID NO: 6799 - protein, 14 aa, synthetic construct
  source 1..14: note = Seed: PPFLWMGYELHPDK; note = HLAs: DPA10103-DPB10101 DPA10103-DPB10201 DPA10103-DPB10202 DPA10103-DPB10401 DPA10103-DPB112601 DPA10103-DPB11501 DPA10103-DPB11601 DPA10103-DPB11901 DPA10103-DPB12301 DPA10103-DPB13401 DPA10103-DPB13901 DPA10103-DPB14001 DPA10103-DPB14101 DPA10103-DPB14801 DPA10103-DPB15901 DPA10104-DPB10101 DPA10104-DPB11501 DPA10105-DPB10101 DPA10105-DPB10401 DPA10106-DPB10101 DPA10201-DPB10101 DPA10201-DPB110601 DPA10201-DPB11501 DPA10201-DPB11601 DPA10201-DPB11901 DPA10202-DPB10101 DPA10202-DPB10201 DPA10202-DPB10202 DPA10202-DPB10401 DPA10202-DPB110601 DPA10202-DPB11901 DPA10202-DPB13101 DPA10202-DPB16501 DPA10301-DPB10101 DPA10301-DPB10201 DPA10301-DPB10202 DPA10301-DPB10401 DPA10301-DPB10402 DPA10301-DPB110501 DPA10301-DPB110601 DPA10301-DPB11801 DPA10301-DPB12301 DPA10301-DPB13901 DPA10301-DPB14001 DPA10301-DPB14901 DPA10301-DPB16501 DPA10301-DPB17501 DPA10301-DPB18001 DPA10401-DPB10101 DPA10401-DPB10201 DPA10401-DPB10202 DPA10401-DPB10402 DPA10401-DPB10501 DPA10401-DPB110501; note = HLAs: DPA10401-DPB14901
PPILWFGFELLPDK

SEQ ID NO: 6800 - protein, 20 aa, synthetic construct
  source 1..20: note = Seed: KEPPFLWMGYELHPDKWTVQ; note = HLAs: DRB1_0101 DRB1_1001 DPA10103-DPB10101 DPA10103-DPB10201 DPA10103-DPB10202 DPA10103-DPB10401 DPA10103-DPB10402 DPA10103-DPB10501 DPA10103-DPB110501 DPA10103-DPB112601 DPA10103-DPB11501 DPA10103-DPB11601 DPA10103-DPB11801 DPA10103-DPB11901 DPA10103-DPB12301 DPA10103-DPB13101 DPA10103-DPB13401 DPA10103-DPB13901 DPA10103-DPB14001 DPA10103-DPB14101 DPA10103-DPB14801 DPA10103-DPB14901 DPA10103-DPB15001 DPA10103-DPB15101 DPA10103-DPB15501 DPA10103-DPB15901 DPA10103-DPB18001 DPA10104-DPB10101 DPA10104-DPB11501 DPA10105-DPB10101 DPA10105-DPB10401 DPA10105-DPB11801 DPA10105-DPB15001 DPA10106-DPB10101 DPA10201-DPB10101 DPA10201-DPB10201 DPA10201-DPB10202 DPA10201-DPB10401 DPA10201-DPB10501 DPA10201-DPB110601 DPA10201-DPB11501 DPA10201-DPB11601 DPA10201-DPB11901 DPA10201-DPB13401 DPA10201-DPB15501 DPA10202-DPB10101 DPA10202-DPB10201 DPA10202-DPB10202 DPA10202-DPB10401 DPA10202-DPB10501 DPA10202-DPB110601 DPA10202-DPB11101 DPA10202-DPB11301 DPA10202-DPB11801 DPA10202-DPB11901; note = HLAs: DPA10202-DPB13101 DPA10202-DPB13801 DPA10202-DPB15501 DPA10202-DPB16501 DPA10301-DPB10101 DPA10301-DPB10201 DPA10301-DPB10202 DPA10301-DPB10401 DPA10301-DPB10402 DPA10301-DPB110501 DPA10301-DPB110601 DPA10301-DPB11101 DPA10301-DPB11301 DPA10301-DPB11801 DPA10301-DPB12301 DPA10301-DPB13901 DPA10301-DPB14001 DPA10301-DPB14901 DPA10301-DPB15501 DPA10301-DPB16501 DPA10301-DPB17501 DPA10301-DPB18001 DPA10401-DPB10101 DPA10401-DPB10201 DPA10401-DPB10202 DPA10401-DPB10402 DPA10401-DPB10501 DPA10401-DPB110501 DPA10401-DPB14901
KEPPFLWEGIELIPDKWTVQ

SEQ ID NO: 6801 - protein, 20 aa, synthetic construct
  source 1..20: note = Seed: KEPPFLWMGYELHPDKWTVQ; note = HLAs: DRB1_0101 DRB1_0405 DRB1_1001 DPA10103-DPB10101 DPA10103-DPB10201 DPA10103-DPB10202 DPA10103-DPB10401 DPA10103-DPB10402 DPA10103-DPB10501 DPA10103-DPB110501 DPA10103-DPB112601 DPA10103-DPB11501 DPA10103-DPB11601 DPA10103-DPB11801 DPA10103-DPB11901 DPA10103-DPB12301 DPA10103-DPB13101 DPA10103-DPB13401 DPA10103-DPB13901 DPA10103-DPB14001 DPA10103-DPB14101 DPA10103-DPB14801 DPA10103-DPB14901 DPA10103-DPB15001 DPA10103-DPB15101 DPA10103-DPB15901 DPA10103-DPB18001 DPA10104-DPB10101 DPA10104-DPB11501 DPA10105-DPB10101 DPA10105-DPB10401 DPA10105-DPB11801 DPA10105-DPB15001 DPA10106-DPB10101 DPA10201-DPB10101 DPA10201-DPB10201 DPA10201-DPB10202 DPA10201-DPB10401 DPA10201-DPB10501 DPA10201-DPB110601 DPA10201-DPB11501 DPA10201-DPB11601 DPA10201-DPB11901 DPA10201-DPB13401 DPA10201-DPB15501 DPA10202-DPB10101 DPA10202-DPB10201 DPA10202-DPB10202 DPA10202-DPB10401 DPA10202-DPB10501 DPA10202-DPB110601 DPA10202-DPB11101 DPA10202-DPB11301 DPA10202-DPB11801 DPA10202-DPB11901 DPA10202-DPB13101; note = HLAs: DPA10202-DPB13801 DPA10202-DPB15501 DPA10202-DPB16501 DPA10301-DPB10101 DPA10301-DPB10201 DPA10301-DPB10202 DPA10301-DPB10401 DPA10301-DPB10402 DPA10301-DPB110501 DPA10301-DPB110601 DPA10301-DPB11801 DPA10301-DPB12301 DPA10301-DPB13901 DPA10301-DPB14001 DPA10301-DPB14901 DPA10301-DPB15501 DPA10301-DPB16501 DPA10301-DPB17501 DPA10301-DPB18001 DPA10401-DPB10101 DPA10401-DPB10201 DPA10401-DPB10202 DPA10401-DPB10402 DPA10401-DPB10501 DPA10401-DPB110501 DPA10401-DPB14901
KEPPFLWQGIELLPDKWTVQ

SEQ ID NO: 6802 - protein, 14 aa, synthetic construct
  source 1..14: note = Seed: PPFLWMGYELHPDK; note = HLAs: DRB1_1001 DPA10103-DPB10101 DPA10103-DPB10201 DPA10103-DPB10202 DPA10103-DPB10401 DPA10103-DPB112601 DPA10103-DPB11501 DPA10103-DPB11601 DPA10103-DPB11901 DPA10103-DPB12301 DPA10103-DPB13101 DPA10103-DPB13401 DPA10103-DPB13901 DPA10103-DPB14001 DPA10103-DPB14101 DPA10103-DPB14801 DPA10103-DPB15001 DPA10103-DPB15901 DPA10104-DPB10101 DPA10104-DPB11501 DPA10105-DPB10101 DPA10105-DPB10401 DPA10105-DPB15001 DPA10106-DPB10101 DPA10201-DPB10101 DPA10201-DPB110601 DPA10201-DPB11501 DPA10201-DPB11601 DPA10201-DPB11901 DPA10202-DPB10101 DPA10202-DPB10201 DPA10202-DPB10202 DPA10202-DPB10401 DPA10202-DPB110601 DPA10202-DPB11901 DPA10202-DPB13101 DPA10202-DPB16501 DPA10301-DPB10101 DPA10301-DPB10201 DPA10301-DPB10202 DPA10301-DPB10401 DPA10301-DPB10402 DPA10301-DPB110501 DPA10301-DPB110601 DPA10301-DPB11801 DPA10301-DPB12301 DPA10301-DPB13901 DPA10301-DPB14001 DPA10301-DPB14901 DPA10301-DPB15501 DPA10301-DPB16501 DPA10301-DPB17501 DPA10301-DPB18001 DPA10401-DPB10101 DPA10401-DPB10201; note = HLAs: DPA10401-DPB10202 DPA10401-DPB10402 DPA10401-DPB10501 DPA10401-DPB110501 DPA10401-DPB14901
PPFLWFGYELMPDK

SEQ ID NO: 6803 - protein, 14 aa, synthetic construct
  source 1..14: note = Seed: PPFLWMGYELHPDK; note = HLAs: DPA10103-DPB10101 DPA10103-DPB10201 DPA10103-DPB10202 DPA10103-DPB10401 DPA10103-DPB112601 DPA10103-DPB11501 DPA10103-DPB11601 DPA10103-DPB11901 DPA10103-DPB12301 DPA10103-DPB13101 DPA10103-DPB13401 DPA10103-DPB13901 DPA10103-DPB14001 DPA10103-DPB14101 DPA10103-DPB14801 DPA10103-DPB15001 DPA10103-DPB15901 DPA10104-DPB10101 DPA10104-DPB11501 DPA10105-DPB10101 DPA10105-DPB10401 DPA10105-DPB15001 DPA10106-DPB10101 DPA10201-DPB10101 DPA10201-DPB110601 DPA10201-DPB11501 DPA10201-DPB11601 DPA10201-DPB11901 DPA10202-DPB10101 DPA10202-DPB10201 DPA10202-DPB10202 DPA10202-DPB10401 DPA10202-DPB110601 DPA10202-DPB11901 DPA10202-DPB13101 DPA10202-DPB16501 DPA10301-DPB10101 DPA10301-DPB10201 DPA10301-DPB10202 DPA10301-DPB10401 DPA10301-DPB10402 DPA10301-DPB110501 DPA10301-DPB110601 DPA10301-DPB11801 DPA10301-DPB12301 DPA10301-DPB13901 DPA10301-DPB14001 DPA10301-DPB14901 DPA10301-DPB15501 DPA10301-DPB16501 DPA10301-DPB17501 DPA10301-DPB18001 DPA10401-DPB10101 DPA10401-DPB10201; note = HLAs: DPA10401-DPB10202 DPA10401-DPB10402 DPA10401-DPB10501 DPA10401-DPB110501 DPA10401-DPB14901
PPFLWHGIELVPDK

SEQ ID NO: 6804 - protein, 20 aa, synthetic construct
  source 1..20: note = Seed: KEPPFLWMGYELHPDKWTVQ; note = HLAs: DRB1_0101 DPA10103-DPB10101 DPA10103-DPB10201 DPA10103-DPB10202 DPA10103-DPB10401 DPA10103-DPB10402 DPA10103-DPB10501 DPA10103-DPB110501 DPA10103-DPB112601 DPA10103-DPB11501 DPA10103-DPB11601 DPA10103-DPB11801 DPA10103-DPB11901 DPA10103-DPB12301 DPA10103-DPB13101 DPA10103-DPB13401 DPA10103-DPB13901 DPA10103-DPB14001 DPA10103-DPB14101 DPA10103-DPB14801 DPA10103-DPB14901 DPA10103-DPB15001 DPA10103-DPB15101 DPA10103-DPB15501 DPA10103-DPB15901 DPA10103-DPB18001 DPA10104-DPB10101 DPA10104-DPB11501 DPA10105-DPB10101 DPA10105-DPB10401 DPA10105-DPB11801 DPA10105-DPB15001 DPA10106-DPB10101 DPA10201-DPB10101 DPA10201-DPB10201 DPA10201-DPB10202 DPA10201-DPB10401 DPA10201-DPB10501 DPA10201-DPB110601 DPA10201-DPB11501 DPA10201-DPB11601 DPA10201-DPB11901 DPA10201-DPB13401 DPA10201-DPB15501 DPA10202-DPB10101 DPA10202-DPB10201 DPA10202-DPB10202 DPA10202-DPB10401 DPA10202-DPB10501 DPA10202-DPB110601 DPA10202-DPB11101 DPA10202-DPB11301 DPA10202-DPB11801 DPA10202-DPB11901 DPA10202-DPB13101; note = HLAs: DPA10202-DPB13801 DPA10202-DPB15501 DPA10202-DPB16501 DPA10301-DPB10101 DPA10301-DPB10201 DPA10301-DPB10202 DPA10301-DPB10401 DPA10301-DPB10402 DPA10301-DPB110501 DPA10301-DPB110601 DPA10301-DPB11101 DPA10301-DPB11301 DPA10301-DPB11801 DPA10301-DPB12301 DPA10301-DPB13901 DPA10301-DPB14001 DPA10301-DPB14901 DPA10301-DPB15501 DPA10301-DPB16501 DPA10301-DPB17501 DPA10301-DPB18001 DPA10401-DPB10101 DPA10401-DPB10201 DPA10401-DPB10202 DPA10401-DPB10402 DPA10401-DPB10501 DPA10401-DPB110501 DPA10401-DPB14901
KEPPYLWFGFELLPDKWTVQ

SEQ ID NO: 6805 - protein, 20 aa, synthetic construct
  source 1..20: note = Seed: KEPPFLWMGYELHPDKWTVQ; note = HLAs: DPA10103-DPB10101 DPA10103-DPB10201 DPA10103-DPB10202 DPA10103-DPB10401 DPA10103-DPB10402 DPA10103-DPB10501 DPA10103-DPB110501 DPA10103-DPB112601 DPA10103-DPB11501 DPA10103-DPB11601 DPA10103-DPB11801 DPA10103-DPB11901 DPA10103-DPB12301 DPA10103-DPB13101 DPA10103-DPB13401 DPA10103-DPB13901 DPA10103-DPB14001 DPA10103-DPB14101 DPA10103-DPB14801 DPA10103-DPB14901 DPA10103-DPB15001 DPA10103-DPB15101 DPA10103-DPB15501 DPA10103-DPB15901 DPA10103-DPB18001 DPA10104-DPB10101 DPA10104-DPB11501 DPA10105-DPB10101 DPA10105-DPB10401 DPA10105-DPB11801 DPA10105-DPB15001 DPA10106-DPB10101 DPA10201-DPB10101 DPA10201-DPB10201 DPA10201-DPB10202 DPA10201-DPB10401 DPA10201-DPB10501 DPA10201-DPB110601 DPA10201-DPB11501 DPA10201-DPB11601 DPA10201-DPB11901 DPA10201-DPB13401 DPA10201-DPB15501 DPA10202-DPB10101 DPA10202-DPB10201 DPA10202-DPB10202 DPA10202-DPB10401 DPA10202-DPB10501 DPA10202-DPB110601 DPA10202-DPB11101 DPA10202-DPB11301 DPA10202-DPB11801 DPA10202-DPB11901 DPA10202-DPB13101 DPA10202-DPB13801; note = HLAs: DPA10202-DPB15501 DPA10202-DPB16501 DPA10301-DPB10101 DPA10301-DPB10201 DPA10301-DPB10202 DPA10301-DPB10401 DPA10301-DPB10402 DPA10301-DPB110501 DPA10301-DPB110601 DPA10301-DPB11101 DPA10301-DPB11301 DPA10301-DPB11801 DPA10301-DPB12301 DPA10301-DPB13901 DPA10301-DPB14001 DPA10301-DPB14901 DPA10301-DPB15501 DPA10301-DPB16501 DPA10301-DPB17501 DPA10301-DPB18001 DPA10401-DPB10101 DPA10401-DPB10201 DPA10401-DPB10202 DPA10401-DPB10402 DPA10401-DPB10501 DPA10401-DPB110501 DPA10401-DPB14901
KEPPFLWWGFELFPDKWTVQ

SEQ ID NO: 6806 - protein, 14 aa, synthetic construct
  source 1..14: note = Seed: PPFLWMGYELHPDK; note = HLAs: DPA10103-DPB10101 DPA10103-DPB10201 DPA10103-DPB10202 DPA10103-DPB10401 DPA10103-DPB112601 DPA10103-DPB11501 DPA10103-DPB11601 DPA10103-DPB11901 DPA10103-DPB12301 DPA10103-DPB13101 DPA10103-DPB13401 DPA10103-DPB13901 DPA10103-DPB14001 DPA10103-DPB14101 DPA10103-DPB14801 DPA10103-DPB15001 DPA10103-DPB15901 DPA10104-DPB10101 DPA10104-DPB11501 DPA10105-DPB10101 DPA10105-DPB10401 DPA10105-DPB15001 DPA10106-DPB10101 DPA10201-DPB10101 DPA10201-DPB110601 DPA10201-DPB11501 DPA10201-DPB11601 DPA10201-DPB11901 DPA10202-DPB10101 DPA10202-DPB10201 DPA10202-DPB10202 DPA10202-DPB10401 DPA10202-DPB110601 DPA10202-DPB11901 DPA10202-DPB13101 DPA10202-DPB16501 DPA10301-DPB10101 DPA10301-DPB10201 DPA10301-DPB10202 DPA10301-DPB10401 DPA10301-DPB10402 DPA10301-DPB110501 DPA10301-DPB110601 DPA10301-DPB11801 DPA10301-DPB12301 DPA10301-DPB13901 DPA10301-DPB14001 DPA10301-DPB14901 DPA10301-DPB15501 DPA10301-DPB16501 DPA10301-DPB17501 DPA10301-DPB18001 DPA10401-DPB10101 DPA10401-DPB10201; note = HLAs: DPA10401-DPB10202 DPA10401-DPB10402 DPA10401-DPB10501 DPA10401-DPB110501 DPA10401-DPB14901
PPYLWIGFELYPDK

SEQ ID NO: 6807 - protein, 14 aa, synthetic construct
  source 1..14: note = Seed: PPFLWMGYELHPDK; note = HLAs: DRB1_1001 DPA10103-DPB10101 DPA10103-DPB10201 DPA10103-DPB10202 DPA10103-DPB10401 DPA10103-DPB112601 DPA10103-DPB11501 DPA10103-DPB11601 DPA10103-DPB11901 DPA10103-DPB12301 DPA10103-DPB13101 DPA10103-DPB13401 DPA10103-DPB13901 DPA10103-DPB14001 DPA10103-DPB14101 DPA10103-DPB14801 DPA10103-DPB15001 DPA10103-DPB15901 DPA10104-DPB10101 DPA10104-DPB11501 DPA10105-DPB10101 DPA10105-DPB10401 DPA10105-DPB15001 DPA10106-DPB10101 DPA10201-DPB10101 DPA10201-DPB110601 DPA10201-DPB11501 DPA10201-DPB11601 DPA10201-DPB11901 DPA10202-DPB10101 DPA10202-DPB10201 DPA10202-DPB10202 DPA10202-DPB10401 DPA10202-DPB110601 DPA10202-DPB11901 DPA10202-DPB13101 DPA10202-DPB16501 DPA10301-DPB10101 DPA10301-DPB10201 DPA10301-DPB10202 DPA10301-DPB10401 DPA10301-DPB10402 DPA10301-DPB110501 DPA10301-DPB110601 DPA10301-DPB11801 DPA10301-DPB12301 DPA10301-DPB13901 DPA10301-DPB14001 DPA10301-DPB14901 DPA10301-DPB15501 DPA10301-DPB16501 DPA10301-DPB17501 DPA10301-DPB18001 DPA10401-DPB10101 DPA10401-DPB10201; note = HLAs: DPA10401-DPB10202 DPA10401-DPB10402 DPA10401-DPB10501 DPA10401-DPB110501 DPA10401-DPB14901
PPFLWLGLELLPDK

SEQ ID NO: 6808 - protein, 20 aa, synthetic construct
  source 1..20: note = Seed: KEPPFLWMGYELHPDKWTVQ; note = HLAs: DRB1_0101 DPA10103-DPB10101 DPA10103-DPB10201 DPA10103-DPB10202 DPA10103-DPB10401 DPA10103-DPB10402 DPA10103-DPB10501 DPA10103-DPB110501 DPA10103-DPB112601 DPA10103-DPB11501 DPA10103-DPB11601 DPA10103-DPB11801 DPA10103-DPB11901 DPA10103-DPB12301 DPA10103-DPB13101 DPA10103-DPB13401 DPA10103-DPB13901 DPA10103-DPB14001 DPA10103-DPB14101 DPA10103-DPB14801 DPA10103-DPB14901 DPA10103-DPB15001 DPA10103-DPB15101 DPA10103-DPB15501 DPA10103-DPB15901 DPA10103-DPB18001 DPA10104-DPB10101 DPA10104-DPB11501 DPA10105-DPB10101 DPA10105-DPB10401 DPA10105-DPB11801 DPA10105-DPB15001 DPA10106-DPB10101 DPA10201-DPB10101 DPA10201-DPB10201 DPA10201-DPB10202 DPA10201-DPB10401 DPA10201-DPB10501 DPA10201-DPB110601 DPA10201-DPB11501 DPA10201-DPB11601 DPA10201-DPB11901 DPA10201-DPB13401 DPA10201-DPB15501 DPA10202-DPB10101 DPA10202-DPB10201 DPA10202-DPB10202 DPA10202-DPB10401 DPA10202-DPB10501 DPA10202-DPB110601 DPA10202-DPB11101 DPA10202-DPB11301 DPA10202-DPB11801 DPA10202-DPB11901 DPA10202-DPB13101; note = HLAs: DPA10202-DPB13801 DPA10202-DPB15501 DPA10202-DPB16501 DPA10301-DPB10101 DPA10301-DPB10201 DPA10301-DPB10202 DPA10301-DPB10401 DPA10301-DPB10402 DPA10301-DPB110501 DPA10301-DPB110601 DPA10301-DPB11101 DPA10301-DPB11301 DPA10301-DPB11801 DPA10301-DPB12301 DPA10301-DPB13901 DPA10301-DPB14001 DPA10301-DPB14901 DPA10301-DPB15501 DPA10301-DPB16501 DPA10301-DPB17501 DPA10301-DPB18001 DPA10401-DPB10101 DPA10401-DPB10201 DPA10401-DPB10202 DPA10401-DPB10402 DPA10401-DPB10501 DPA10401-DPB110501 DPA10401-DPB14901
KEPPFLWSGWELAPDKWTVQ

SEQ ID NO: 6809 - protein, 14 aa, synthetic construct
  source 1..14: note = Seed: PPFLWMGYELHPDK; note = HLAs: DRB1_1001 DPA10103-DPB10201 DPA10103-DPB10202 DPA10103-DPB10401 DPA10103-DPB112601 DPA10103-DPB11501 DPA10103-DPB11601 DPA10103-DPB11901 DPA10103-DPB12301 DPA10103-DPB13401 DPA10103-DPB13901 DPA10103-DPB14001 DPA10103-DPB14101 DPA10103-DPB14801 DPA10103-DPB15901 DPA10104-DPB11501 DPA10105-DPB10401 DPA10106-DPB10101 DPA10201-DPB10101 DPA10201-DPB110601 DPA10201-DPB11501 DPA10201-DPB11601 DPA10201-DPB11901 DPA10202-DPB10101 DPA10202-DPB10201 DPA10202-DPB10202 DPA10202-DPB10401 DPA10202-DPB110601 DPA10202-DPB11901 DPA10202-DPB13101 DPA10202-DPB16501 DPA10301-DPB10101 DPA10301-DPB10201 DPA10301-DPB10202 DPA10301-DPB10401 DPA10301-DPB10402 DPA10301-DPB110501 DPA10301-DPB110601 DPA10301-DPB11801 DPA10301-DPB12301 DPA10301-DPB13901 DPA10301-DPB14001 DPA10301-DPB14901 DPA10301-DPB15501 DPA10301-DPB16501 DPA10301-DPB17501 DPA10301-DPB18001 DPA10401-DPB10201 DPA10401-DPB10202 DPA10401-DPB10402 DPA10401-DPB10501 DPA10401-DPB110501 DPA10401-DPB14901
PPFLWIGVELLPDK

SEQ ID NO: 6810 - protein, 20 aa, synthetic construct
  source 1..20: note = Seed: KEPPFLWMGYELHPDKWTVQ; note = HLAs: DRB1_0101 DRB1_1001 DPA10103-DPB10101 DPA10103-DPB10201 DPA10103-DPB10202 DPA10103-DPB10401 DPA10103-DPB10402 DPA10103-DPB10501 DPA10103-DPB110501 DPA10103-DPB112601 DPA10103-DPB11501 DPA10103-DPB11601 DPA10103-DPB11801 DPA10103-DPB11901 DPA10103-DPB12301 DPA10103-DPB13101 DPA10103-DPB13401 DPA10103-DPB13901 DPA10103-DPB14001 DPA10103-DPB14101 DPA10103-DPB14801 DPA10103-DPB14901 DPA10103-DPB15001 DPA10103-DPB15101 DPA10103-DPB15501 DPA10103-DPB15901 DPA10103-DPB18001 DPA10104-DPB10101 DPA10104-DPB11501 DPA10105-DPB10101 DPA10105-DPB10401 DPA10105-DPB11801 DPA10105-DPB15001 DPA10106-DPB10101 DPA10201-DPB10101 DPA10201-DPB10201 DPA10201-DPB10202 DPA10201-DPB10401 DPA10201-DPB10501 DPA10201-DPB110601 DPA10201-DPB11501 DPA10201-DPB11601 DPA10201-DPB11901 DPA10201-DPB13401 DPA10201-DPB15501 DPA10202-DPB10101 DPA10202-DPB10201 DPA10202-DPB10202 DPA10202-DPB10401 DPA10202-DPB10501 DPA10202-DPB110601 DPA10202-DPB11101 DPA10202-DPB11301 DPA10202-DPB11801 DPA10202-DPB11901; note = HLAs: DPA10202-DPB13101 DPA10202-DPB13801 DPA10202-DPB15501 DPA10202-DPB16501 DPA10301-DPB10101 DPA10301-DPB10201 DPA10301-DPB10202 DPA10301-DPB10401 DPA10301-DPB10402 DPA10301-DPB110501 DPA10301-DPB110601 DPA10301-DPB11101 DPA10301-DPB11301 DPA10301-DPB11801 DPA10301-DPB12301 DPA10301-DPB13901 DPA10301-DPB14001 DPA10301-DPB14901 DPA10301-DPB15501 DPA10301-DPB16501 DPA10301-DPB17501 DPA10301-DPB18001 DPA10401-DPB10101 DPA10401-DPB10201 DPA10401-DPB10202 DPA10401-DPB10402 DPA10401-DPB10501 DPA10401-DPB110501 DPA10401-DPB14901
KEPPFLWAGIELVPDKWTVQ

SEQ ID NO: 6811 - protein, 20 aa, synthetic construct
  source 1..20: note = Seed: KEPPFLWMGYELHPDKWTVQ; note = HLAs: DPA10103-DPB10101 DPA10103-DPB10201 DPA10103-DPB10202 DPA10103-DPB10401 DPA10103-DPB10402 DPA10103-DPB10501 DPA10103-DPB110501 DPA10103-DPB112601 DPA10103-DPB11501 DPA10103-DPB11601 DPA10103-DPB11801 DPA10103-DPB11901 DPA10103-DPB12301 DPA10103-DPB13101 DPA10103-DPB13401 DPA10103-DPB13901 DPA10103-DPB14001 DPA10103-DPB14101 DPA10103-DPB14801 DPA10103-DPB14901 DPA10103-DPB15001 DPA10103-DPB15101 DPA10103-DPB15501 DPA10103-DPB15901 DPA10103-DPB18001 DPA10104-DPB10101 DPA10104-DPB11501 DPA10105-DPB10101 DPA10105-DPB10401 DPA10105-DPB11801 DPA10105-DPB15001 DPA10106-DPB10101 DPA10201-DPB10101 DPA10201-DPB10201 DPA10201-DPB10202 DPA10201-DPB10401 DPA10201-DPB10501 DPA10201-DPB110601 DPA10201-DPB11501 DPA10201-DPB11601 DPA10201-DPB11901 DPA10201-DPB13401 DPA10201-DPB15501 DPA10202-DPB10101 DPA10202-DPB10201 DPA10202-DPB10202 DPA10202-DPB10401 DPA10202-DPB10501 DPA10202-DPB110601 DPA10202-DPB11101 DPA10202-DPB11301 DPA10202-DPB11801 DPA10202-DPB11901 DPA10202-DPB13101 DPA10202-DPB13801; note = HLAs: DPA10202-DPB15501 DPA10202-DPB16501 DPA10301-DPB10101 DPA10301-DPB10201 DPA10301-DPB10202 DPA10301-DPB10401 DPA10301-DPB10402 DPA10301-DPB110501 DPA10301-DPB110601 DPA10301-DPB11801 DPA10301-DPB12301 DPA10301-DPB13901 DPA10301-DPB14001 DPA10301-DPB14901 DPA10301-DPB16501 DPA10301-DPB17501 DPA10301-DPB18001 DPA10401-DPB10101 DPA10401-DPB10201 DPA10401-DPB10202 DPA10401-DPB10402 DPA10401-DPB10501 DPA10401-DPB110501 DPA10401-DPB14901
KEPPYLWRGFELLPDKWTVQ

SEQ ID NO: 6812 - protein, 20 aa, synthetic construct
  source 1..20: note = Seed: KEPPFLWMGYELHPDKWTVQ; note = HLAs: DPA10103-DPB10101 DPA10103-DPB10201 DPA10103-DPB10202 DPA10103-DPB10401 DPA10103-DPB10402 DPA10103-DPB10501 DPA10103-DPB110501 DPA10103-DPB112601 DPA10103-DPB11501 DPA10103-DPB11601 DPA10103-DPB11801 DPA10103-DPB11901 DPA10103-DPB12301 DPA10103-DPB13101 DPA10103-DPB13401 DPA10103-DPB13901 DPA10103-DPB14001 DPA10103-DPB14101 DPA10103-DPB14801 DPA10103-DPB14901 DPA10103-DPB15001 DPA10103-DPB15101 DPA10103-DPB15501 DPA10103-DPB15901 DPA10103-DPB18001 DPA10104-DPB10101 DPA10104-DPB11501 DPA10105-DPB10101 DPA10105-DPB10401 DPA10105-DPB11801 DPA10105-DPB15001 DPA10106-DPB10101 DPA10201-DPB10101 DPA10201-DPB10201 DPA10201-DPB10202 DPA10201-DPB10401 DPA10201-DPB10501 DPA10201-DPB110601 DPA10201-DPB11501 DPA10201-DPB11601 DPA10201-DPB11901 DPA10201-DPB13401 DPA10201-DPB15501 DPA10202-DPB10101 DPA10202-DPB10201 DPA10202-DPB10202 DPA10202-DPB10401 DPA10202-DPB10501 DPA10202-DPB110601 DPA10202-DPB11101 DPA10202-DPB11301 DPA10202-DPB11801 DPA10202-DPB11901 DPA10202-DPB13101 DPA10202-DPB13801; note = HLAs: DPA10202-DPB15501 DPA10202-DPB16501 DPA10301-DPB10101 DPA10301-DPB10201 DPA10301-DPB10202 DPA10301-DPB10401 DPA10301-DPB10402 DPA10301-DPB110501 DPA10301-DPB110601 DPA10301-DPB11101 DPA10301-DPB11301 DPA10301-DPB11801 DPA10301-DPB12301 DPA10301-DPB13901 DPA10301-DPB14001 DPA10301-DPB14901 DPA10301-DPB15501 DPA10301-DPB16501 DPA10301-DPB17501 DPA10301-DPB18001 DPA10401-DPB10101 DPA10401-DPB10201 DPA10401-DPB10202 DPA10401-DPB10402 DPA10401-DPB10501 DPA10401-DPB110501 DPA10401-DPB14901
KEPPYLWIGFELFPDKWTVQ

SEQ ID NO: 6813 - protein, 20 aa, synthetic construct
  source 1..20: note = Seed: KEPPFLWMGYELHPDKWTVQ; note = HLAs: DPA10103-DPB10101 DPA10103-DPB10201 DPA10103-DPB10202 DPA10103-DPB10401 DPA10103-DPB10402 DPA10103-DPB10501 DPA10103-DPB110501 DPA10103-DPB112601 DPA10103-DPB11501 DPA10103-DPB11601 DPA10103-DPB11801 DPA10103-DPB11901 DPA10103-DPB12301 DPA10103-DPB13101 DPA10103-DPB13401 DPA10103-DPB13901 DPA10103-DPB14001 DPA10103-DPB14101 DPA10103-DPB14801 DPA10103-DPB14901 DPA10103-DPB15001 DPA10103-DPB15101 DPA10103-DPB15501 DPA10103-DPB15901 DPA10103-DPB18001 DPA10104-DPB10101 DPA10104-DPB11501 DPA10105-DPB10101 DPA10105-DPB10401 DPA10105-DPB11801 DPA10105-DPB15001 DPA10106-DPB10101 DPA10201-DPB10101 DPA10201-DPB10201 DPA10201-DPB10202 DPA10201-DPB10401 DPA10201-DPB10501 DPA10201-DPB110601 DPA10201-DPB11501 DPA10201-DPB11601 DPA10201-DPB11901 DPA10201-DPB13401 DPA10201-DPB15501 DPA10202-DPB10101 DPA10202-DPB10201 DPA10202-DPB10202 DPA10202-DPB10401 DPA10202-DPB10501 DPA10202-DPB110601 DPA10202-DPB11101 DPA10202-DPB11301 DPA10202-DPB11801 DPA10202-DPB11901 DPA10202-DPB13101 DPA10202-DPB13801; note = HLAs: DPA10202-DPB15501 DPA10202-DPB16501 DPA10301-DPB10101 DPA10301-DPB10201 DPA10301-DPB10202 DPA10301-DPB10401 DPA10301-DPB10402 DPA10301-DPB110501 DPA10301-DPB110601 DPA10301-DPB11101 DPA10301-DPB11301 DPA10301-DPB11801 DPA10301-DPB12301 DPA10301-DPB13901 DPA10301-DPB14001 DPA10301-DPB14901 DPA10301-DPB15501 DPA10301-DPB16501 DPA10301-DPB17501 DPA10301-DPB18001 DPA10401-DPB10101 DPA10401-DPB10201 DPA10401-DPB10202 DPA10401-DPB10402 DPA10401-DPB10501 DPA10401-DPB110501 DPA10401-DPB14901
KEPPWLWVGFELLPDKWTVQ

SEQ ID NO: 6814 - protein, 20 aa, synthetic construct
  source 1..20: note = Seed: KEPPFLWMGYELHPDKWTVQ; note = HLAs: DPA10103-DPB10101 DPA10103-DPB10201 DPA10103-DPB10202 DPA10103-DPB10401 DPA10103-DPB10402 DPA10103-DPB10501 DPA10103-DPB110501 DPA10103-DPB112601 DPA10103-DPB11501 DPA10103-DPB11601 DPA10103-DPB11801 DPA10103-DPB11901 DPA10103-DPB12301 DPA10103-DPB13101 DPA10103-DPB13401 DPA10103-DPB13901 DPA10103-DPB14001 DPA10103-DPB14101 DPA10103-DPB14801 DPA10103-DPB14901 DPA10103-DPB15001 DPA10103-DPB15101 DPA10103-DPB15501 DPA10103-DPB15901 DPA10103-DPB18001 DPA10104-DPB10101 DPA10104-DPB11501 DPA10105-DPB10101 DPA10105-DPB10401 DPA10105-DPB11801 DPA10105-DPB15001 DPA10106-DPB10101 DPA10201-DPB10101 DPA10201-DPB10201 DPA10201-DPB10202 DPA10201-DPB10401 DPA10201-DPB10501 DPA10201-DPB110601 DPA10201-DPB11501 DPA10201-DPB11601 DPA10201-DPB11901 DPA10201-DPB13401 DPA10201-DPB15501 DPA10202-DPB10101 DPA10202-DPB10201 DPA10202-DPB10202 DPA10202-DPB10401 DPA10202-DPB10501 DPA10202-DPB110601 DPA10202-DPB11101 DPA10202-DPB11301 DPA10202-DPB11801 DPA10202-DPB11901 DPA10202-DPB13101 DPA10202-DPB13801; note = HLAs: DPA10202-DPB15501 DPA10202-DPB16501 DPA10301-DPB10101 DPA10301-DPB10201 DPA10301-DPB10202 DPA10301-DPB10401 DPA10301-DPB10402 DPA10301-DPB110501 DPA10301-DPB110601 DPA10301-DPB11101 DPA10301-DPB11301 DPA10301-DPB11801 DPA10301-DPB12301 DPA10301-DPB13901 DPA10301-DPB14001 DPA10301-DPB14901 DPA10301-DPB15501 DPA10301-DPB16501 DPA10301-DPB17501 DPA10301-DPB18001 DPA10401-DPB10101 DPA10401-DPB10201 DPA10401-DPB10202 DPA10401-DPB10402 DPA10401-DPB10501 DPA10401-DPB110501 DPA10401-DPB14901
KEPPFLWHGYELMPDKWTVQ

SEQ ID NO: 6815 - protein, 14 aa, synthetic construct
  source 1..14: note = Seed: PPFLWMGYELHPDK; note = HLAs: DRB1_1001 DPA10103-DPB10101 DPA10103-DPB10201 DPA10103-DPB10202 DPA10103-DPB10401 DPA10103-DPB112601 DPA10103-DPB11501 DPA10103-DPB11601 DPA10103-DPB11901 DPA10103-DPB12301 DPA10103-DPB13101 DPA10103-DPB13401 DPA10103-DPB13901 DPA10103-DPB14001 DPA10103-DPB14101 DPA10103-DPB14801 DPA10103-DPB15001 DPA10103-DPB15901 DPA10104-DPB10101 DPA10104-DPB11501 DPA10105-DPB10101 DPA10105-DPB10401 DPA10105-DPB15001 DPA10106-DPB10101 DPA10201-DPB10101 DPA10201-DPB110601 DPA10201-DPB11501 DPA10201-DPB11601 DPA10201-DPB11901 DPA10202-DPB10101 DPA10202-DPB10201 DPA10202-DPB10202 DPA10202-DPB10401 DPA10202-DPB110601 DPA10202-DPB11901 DPA10202-DPB13101 DPA10202-DPB16501 DPA10301-DPB10101 DPA10301-DPB10201 DPA10301-DPB10202 DPA10301-DPB10401 DPA10301-DPB10402 DPA10301-DPB110501 DPA10301-DPB110601 DPA10301-DPB11801 DPA10301-DPB12301 DPA10301-DPB13901 DPA10301-DPB14001 DPA10301-DPB14901 DPA10301-DPB15501 DPA10301-DPB16501 DPA10301-DPB17501 DPA10301-DPB18001 DPA10401-DPB10101 DPA10401-DPB10201; note = HLAs: DPA10401-DPB10202 DPA10401-DPB10402 DPA10401-DPB10501 DPA10401-DPB110501 DPA10401-DPB14901
PPYLWEGFELAPDK

SEQ ID NO: 6816 - protein, 14 aa, synthetic construct
  source 1..14: note = Seed: PPFLWMGYELHPDK; note = HLAs: DPA10103-DPB10101 DPA10103-DPB10201 DPA10103-DPB10202 DPA10103-DPB10401 DPA10103-DPB112601 DPA10103-DPB11501 DPA10103-DPB11601 DPA10103-DPB11901 DPA10103-DPB12301 DPA10103-DPB13101 DPA10103-DPB13401 DPA10103-DPB13901 DPA10103-DPB14001 DPA10103-DPB14101 DPA10103-DPB14801 DPA10103-DPB15001 DPA10103-DPB15901 DPA10104-DPB10101 DPA10104-DPB11501 DPA10105-DPB10101 DPA10105-DPB10401 DPA10105-DPB15001 DPA10106-DPB10101 DPA10201-DPB10101 DPA10201-DPB110601 DPA10201-DPB11501 DPA10201-DPB11601 DPA10201-DPB11901 DPA10202-DPB10101 DPA10202-DPB10201 DPA10202-DPB10202 DPA10202-DPB10401 DPA10202-DPB110601 DPA10202-DPB11901 DPA10202-DPB13101 DPA10202-DPB16501 DPA10301-DPB10101 DPA10301-DPB10201 DPA10301-DPB10202 DPA10301-DPB10401 DPA10301-DPB10402 DPA10301-DPB110501 DPA10301-DPB110601 DPA10301-DPB11801 DPA10301-DPB12301 DPA10301-DPB13901 DPA10301-DPB14001 DPA10301-DPB14901 DPA10301-DPB15501 DPA10301-DPB16501 DPA10301-DPB17501 DPA10301-DPB18001 DPA10401-DPB10101 DPA10401-DPB10201; note = HLAs: DPA10401-DPB10202 DPA10401-DPB10402 DPA10401-DPB10501 DPA10401-DPB110501 DPA10401-DPB14901
PPLLWFGFELVPDK

SEQ ID NO: 6817 - protein, 20 aa, synthetic construct
  source 1..20: note = Seed: KEPPFLWMGYELHPDKWTVQ; note = HLAs: DRB1_0101 DPA10103-DPB10101 DPA10103-DPB10201 DPA10103-DPB10202 DPA10103-DPB10401 DPA10103-DPB10402 DPA10103-DPB10501 DPA10103-DPB110501 DPA10103-DPB112601 DPA10103-DPB11501 DPA10103-DPB11601 DPA10103-DPB11801 DPA10103-DPB11901 DPA10103-DPB12301 DPA10103-DPB13101 DPA10103-DPB13401 DPA10103-DPB13901 DPA10103-DPB14001 DPA10103-DPB14101 DPA10103-DPB14801 DPA10103-DPB14901 DPA10103-DPB15001 DPA10103-DPB15101 DPA10103-DPB15501 DPA10103-DPB15901 DPA10103-DPB18001 DPA10104-DPB10101 DPA10104-DPB11501 DPA10105-DPB10101 DPA10105-DPB10401 DPA10105-DPB11801 DPA10105-DPB15001 DPA10106-DPB10101 DPA10201-DPB10101 DPA10201-DPB10201 DPA10201-DPB10202 DPA10201-DPB10401 DPA10201-DPB10501 DPA10201-DPB110601 DPA10201-DPB11501 DPA10201-DPB11601 DPA10201-DPB11901 DPA10201-DPB13401 DPA10201-DPB15501 DPA10202-DPB10101 DPA10202-DPB10201 DPA10202-DPB10202 DPA10202-DPB10401 DPA10202-DPB10501 DPA10202-DPB110601 DPA10202-DPB11101 DPA10202-DPB11301 DPA10202-DPB11801 DPA10202-DPB11901 DPA10202-DPB13101; note = HLAs: DPA10202-DPB13801 DPA10202-DPB15501 DPA10202-DPB16501 DPA10301-DPB10101 DPA10301-DPB10201 DPA10301-DPB10202 DPA10301-DPB10401 DPA10301-DPB10402 DPA10301-DPB110501 DPA10301-DPB110601 DPA10301-DPB11101 DPA10301-DPB11301 DPA10301-DPB11801 DPA10301-DPB12301 DPA10301-DPB13901 DPA10301-DPB14001 DPA10301-DPB14901 DPA10301-DPB15501 DPA10301-DPB16501 DPA10301-DPB17501 DPA10301-DPB18001 DPA10401-DPB10101 DPA10401-DPB10201 DPA10401-DPB10202 DPA10401-DPB10402 DPA10401-DPB10501 DPA10401-DPB110501 DPA10401-DPB14901
KEPPFLWTGLELFPDKWTVQ

SEQ ID NO: 6818 - protein, 20 aa, synthetic construct
  source 1..20: note = Seed: KEPPFLWMGYELHPDKWTVQ; note = HLAs: DRB1_0101 DPA10103-DPB10101 DPA10103-DPB10201 DPA10103-DPB10202 DPA10103-DPB10401 DPA10103-DPB10402 DPA10103-DPB10501 DPA10103-DPB110501 DPA10103-DPB112601 DPA10103-DPB11501 DPA10103-DPB11601 DPA10103-DPB11801 DPA10103-DPB11901 DPA10103-DPB12301 DPA10103-DPB13101 DPA10103-DPB13401 DPA10103-DPB13901 DPA10103-DPB14001 DPA10103-DPB14101 DPA10103-DPB14801 DPA10103-DPB14901 DPA10103-DPB15001 DPA10103-DPB15101 DPA10103-DPB15501 DPA10103-DPB15901 DPA10103-DPB18001 DPA10104-DPB10101 DPA10104-DPB11501 DPA10105-DPB10101 DPA10105-DPB10401 DPA10105-DPB11801 DPA10105-DPB15001 DPA10106-DPB10101 DPA10201-DPB10101 DPA10201-DPB10201 DPA10201-DPB10202 DPA10201-DPB10401 DPA10201-DPB10501 DPA10201-DPB110601 DPA10201-DPB11501 DPA10201-DPB11601 DPA10201-DPB11901 DPA10201-DPB13401 DPA10201-DPB15501 DPA10202-DPB10101 DPA10202-DPB10201 DPA10202-DPB10202 DPA10202-DPB10401 DPA10202-DPB10501 DPA10202-DPB110601 DPA10202-DPB11101 DPA10202-DPB11301 DPA10202-DPB11801 DPA10202-DPB11901 DPA10202-DPB13101; note = HLAs: DPA10202-DPB13801 DPA10202-DPB15501 DPA10202-DPB16501 DPA10301-DPB10101 DPA10301-DPB10201 DPA10301-DPB10202 DPA10301-DPB10401 DPA10301-DPB10402 DPA10301-DPB110501 DPA10301-DPB110601 DPA10301-DPB11101 DPA10301-DPB11301 DPA10301-DPB11801 DPA10301-DPB12301 DPA10301-DPB13901 DPA10301-DPB14001 DPA10301-DPB14901 DPA10301-DPB15501 DPA10301-DPB16501 DPA10301-DPB17501 DPA10301-DPB18001 DPA10401-DPB10101 DPA10401-DPB10201 DPA10401-DPB10202 DPA10401-DPB10402 DPA10401-DPB10501 DPA10401-DPB110501 DPA10401-DPB14901
KEPPFLWHGMELIPDKWTVQ

SEQ ID NO: 6819 - protein, 14 aa, synthetic construct
  source 1..14: note = Seed: PPFLWMGYELHPDK; note = HLAs: DRB1_1001 DPA10103-DPB10101 DPA10103-DPB10201 DPA10103-DPB10202 DPA10103-DPB10401 DPA10103-DPB112601 DPA10103-DPB11501 DPA10103-DPB11601 DPA10103-DPB11901 DPA10103-DPB12301 DPA10103-DPB13101 DPA10103-DPB13401 DPA10103-DPB13901 DPA10103-DPB14001 DPA10103-DPB14101 DPA10103-DPB14801 DPA10103-DPB15001 DPA10103-DPB15901 DPA10104-DPB10101 DPA10104-DPB11501 DPA10105-DPB10101 DPA10105-DPB10401 DPA10105-DPB15001 DPA10106-DPB10101 DPA10201-DPB10101 DPA10201-DPB110601 DPA10201-DPB11501 DPA10201-DPB11601 DPA10201-DPB11901 DPA10202-DPB10101 DPA10202-DPB10201 DPA10202-DPB10202 DPA10202-DPB10401 DPA10202-DPB110601 DPA10202-DPB11901 DPA10202-DPB13101 DPA10202-DPB16501 DPA10301-DPB10101 DPA10301-DPB10201 DPA10301-DPB10202 DPA10301-DPB10401 DPA10301-DPB10402 DPA10301-DPB110501 DPA10301-DPB110601 DPA10301-DPB11801 DPA10301-DPB12301 DPA10301-DPB13901 DPA10301-DPB14001 DPA10301-DPB14901 DPA10301-DPB15501 DPA10301-DPB16501 DPA10301-DPB17501 DPA10301-DPB18001 DPA10401-DPB10101 DPA10401-DPB10201; note = HLAs: DPA10401-DPB10202 DPA10401-DPB10402 DPA10401-DPB10501 DPA10401-DPB110501 DPA10401-DPB14901
PPYLWFGFELMPDK

SEQ ID NO: 6820 - protein, 14 aa, synthetic construct
  source 1..14: note = Seed: PPFLWMGYELHPDK; note = HLAs: DPA10103-DPB10101 DPA10103-DPB10201 DPA10103-DPB10202 DPA10103-DPB10401 DPA10103-DPB112601 DPA10103-DPB11501 DPA10103-DPB11601 DPA10103-DPB11901 DPA10103-DPB12301 DPA10103-DPB13101 DPA10103-DPB13401 DPA10103-DPB13901 DPA10103-DPB14001 DPA10103-DPB14101 DPA10103-DPB14801 DPA10103-DPB15001 DPA10103-DPB15901 DPA10104-DPB10101 DPA10104-DPB11501 DPA10105-DPB10101 DPA10105-DPB10401 DPA10105-DPB15001 DPA10106-DPB10101 DPA10201-DPB10101 DPA10201-DPB110601 DPA10201-DPB11501 DPA10201-DPB11601 DPA10201-DPB11901 DPA10202-DPB10101 DPA10202-DPB10201 DPA10202-DPB10202 DPA10202-DPB10401 DPA10202-DPB110601 DPA10202-DPB11901 DPA10202-DPB13101 DPA10202-DPB16501 DPA10301-DPB10101 DPA10301-DPB10201 DPA10301-DPB10202 DPA10301-DPB10401 DPA10301-DPB10402 DPA10301-DPB110501 DPA10301-DPB110601 DPA10301-DPB11801 DPA10301-DPB12301 DPA10301-DPB13901 DPA10301-DPB14001 DPA10301-DPB14901 DPA10301-DPB15501 DPA10301-DPB16501 DPA10301-DPB17501 DPA10301-DPB18001 DPA10401-DPB10101 DPA10401-DPB10201; note = HLAs: DPA10401-DPB10202 DPA10401-DPB10402 DPA10401-DPB10501 DPA10401-DPB110501 DPA10401-DPB14901
PPFLWPGFELLPDK

SEQ ID NO: 6821 - protein, 20 aa, synthetic construct
  source 1..20: note = Seed: KEPPFLWMGYELHPDKWTVQ; note = HLAs: DRB1_0101 DPA10103-DPB10101 DPA10103-DPB10201 DPA10103-DPB10202 DPA10103-DPB10401 DPA10103-DPB10402 DPA10103-DPB10501 DPA10103-DPB110501 DPA10103-DPB112601 DPA10103-DPB11501 DPA10103-DPB11601 DPA10103-DPB11801 DPA10103-DPB11901 DPA10103-DPB12301 DPA10103-DPB13101 DPA10103-DPB13401 DPA10103-DPB13901 DPA10103-DPB14001 DPA10103-DPB14101 DPA10103-DPB14801 DPA10103-DPB14901 DPA10103-DPB15001 DPA10103-DPB15101 DPA10103-DPB15501 DPA10103-DPB15901 DPA10103-DPB18001 DPA10104-DPB10101 DPA10104-DPB11501 DPA10105-DPB10101 DPA10105-DPB10401 DPA10105-DPB11801 DPA10105-DPB15001 DPA10106-DPB10101 DPA10201-DPB10101 DPA10201-DPB10201 DPA10201-DPB10202 DPA10201-DPB10401 DPA10201-DPB10501 DPA10201-DPB110601 DPA10201-DPB11501 DPA10201-DPB11601 DPA10201-DPB11901 DPA10201-DPB13401 DPA10201-DPB15501 DPA10202-DPB10101 DPA10202-DPB10201 DPA10202-DPB10202 DPA10202-DPB10401 DPA10202-DPB10501 DPA10202-DPB110601 DPA10202-DPB11101 DPA10202-DPB11301 DPA10202-DPB11801 DPA10202-DPB11901 DPA10202-DPB13101; note = HLAs: DPA10202-DPB13801 DPA10202-DPB15501 DPA10202-DPB16501 DPA10301-DPB10101 DPA10301-DPB10201 DPA10301-DPB10202 DPA10301-DPB10401 DPA10301-DPB10402 DPA10301-DPB110501 DPA10301-DPB110601 DPA10301-DPB11101 DPA10301-DPB11301 DPA10301-DPB11801 DPA10301-DPB12301 DPA10301-DPB13901 DPA10301-DPB14001 DPA10301-DPB14901 DPA10301-DPB15501 DPA10301-DPB16501 DPA10301-DPB17501 DPA10301-DPB18001 DPA10401-DPB10101 DPA10401-DPB10201 DPA10401-DPB10202 DPA10401-DPB10402 DPA10401-DPB10501 DPA10401-DPB110501 DPA10401-DPB14901
KEPPFLWNGWELIPDKWTVQ

SEQ ID NO: 6822 - protein, 20 aa, synthetic construct
  source 1..20: note = Seed: KEPPFLWMGYELHPDKWTVQ; note = HLAs: DRB1_0101 DPA10103-DPB10101 DPA10103-DPB10201 DPA10103-DPB10202 DPA10103-DPB10401 DPA10103-DPB10402 DPA10103-DPB10501 DPA10103-DPB110501 DPA10103-DPB112601 DPA10103-DPB11501 DPA10103-DPB11601 DPA10103-DPB11801 DPA10103-DPB11901 DPA10103-DPB12301 DPA10103-DPB13101 DPA10103-DPB13401 DPA10103-DPB13901 DPA10103-DPB14001 DPA10103-DPB14101 DPA10103-DPB14801 DPA10103-DPB14901 DPA10103-DPB15001 DPA10103-DPB15101 DPA10103-DPB15501 DPA10103-DPB15901 DPA10103-DPB18001 DPA10104-DPB10101 DPA10104-DPB11501 DPA10105-DPB10101 DPA10105-DPB10401 DPA10105-DPB11801 DPA10105-DPB15001 DPA10106-DPB10101 DPA10201-DPB10101 DPA10201-DPB10201 DPA10201-DPB10202 DPA10201-DPB10401 DPA10201-DPB10501 DPA10201-DPB110601 DPA10201-DPB11501 DPA10201-DPB11601 DPA10201-DPB11901 DPA10201-DPB13401 DPA10201-DPB15501 DPA10202-DPB10101 DPA10202-DPB10201 DPA10202-DPB10202 DPA10202-DPB10401 DPA10202-DPB10501 DPA10202-DPB110601 DPA10202-DPB11101 DPA10202-DPB11301 DPA10202-DPB11801 DPA10202-DPB11901 DPA10202-DPB13101; note = HLAs: DPA10202-DPB13801 DPA10202-DPB15501 DPA10202-DPB16501 DPA10301-DPB10101 DPA10301-DPB10201 DPA10301-DPB10202 DPA10301-DPB10401 DPA10301-DPB10402 DPA10301-DPB110501 DPA10301-DPB110601 DPA10301-DPB11101 DPA10301-DPB11301 DPA10301-DPB11801 DPA10301-DPB12301 DPA10301-DPB13901 DPA10301-DPB14001 DPA10301-DPB14901 DPA10301-DPB15501 DPA10301-DPB16501 DPA10301-DPB17501 DPA10301-DPB18001 DPA10401-DPB10101 DPA10401-DPB10201 DPA10401-DPB10202 DPA10401-DPB10402 DPA10401-DPB10501 DPA10401-DPB110501 DPA10401-DPB14901
KEPPFLWYGFELIPDKWTVQ

SEQ ID NO: 6823 - protein, 20 aa, synthetic construct
  source 1..20: note = Seed: KEPPFLWMGYELHPDKWTVQ; note = HLAs: DRB1_0101 DRB1_0405 DRB1_1001 DPA10103-DPB10101 DPA10103-DPB10201 DPA10103-DPB10202 DPA10103-DPB10401 DPA10103-DPB10402 DPA10103-DPB10501 DPA10103-DPB110501 DPA10103-DPB112601 DPA10103-DPB11501 DPA10103-DPB11601 DPA10103-DPB11801 DPA10103-DPB11901 DPA10103-DPB12301 DPA10103-DPB13101 DPA10103-DPB13401 DPA10103-DPB13901 DPA10103-DPB14001 DPA10103-DPB14101 DPA10103-DPB14801 DPA10103-DPB14901 DPA10103-DPB15001 DPA10103-DPB15101 DPA10103-DPB15501 DPA10103-DPB15901 DPA10103-DPB18001 DPA10104-DPB10101 DPA10104-DPB11501 DPA10105-DPB10101 DPA10105-DPB10401 DPA10105-DPB11801 DPA10105-DPB15001 DPA10106-DPB10101 DPA10201-DPB10101 DPA10201-DPB10201 DPA10201-DPB10202 DPA10201-DPB10401 DPA10201-DPB10501 DPA10201-DPB110601 DPA10201-DPB11501 DPA10201-DPB11601 DPA10201-DPB11901 DPA10201-DPB13401 DPA10201-DPB15501 DPA10202-DPB10101 DPA10202-DPB10201 DPA10202-DPB10202 DPA10202-DPB10401 DPA10202-DPB10501 DPA10202-DPB110601 DPA10202-DPB11101 DPA10202-DPB11301 DPA10202-DPB11801 DPA10202-DPB11901; note = HLAs: DPA10202-DPB13101 DPA10202-DPB13801 DPA10202-DPB15501 DPA10202-DPB16501 DPA10301-DPB10101 DPA10301-DPB10201 DPA10301-DPB10202 DPA10301-DPB10401 DPA10301-DPB10402 DPA10301-DPB110501 DPA10301-DPB110601 DPA10301-DPB11101 DPA10301-DPB11301 DPA10301-DPB11801 DPA10301-DPB12301 DPA10301-DPB13901 DPA10301-DPB14001 DPA10301-DPB14901 DPA10301-DPB15501 DPA10301-DPB16501 DPA10301-DPB17501 DPA10301-DPB18001 DPA10401-DPB10101 DPA10401-DPB10201 DPA10401-DPB10202 DPA10401-DPB10402 DPA10401-DPB10501 DPA10401-DPB110501 DPA10401-DPB14901
KEPPFLWTGAELLPDKWTVQ

SEQ ID NO: 6824 - protein, 14 aa, synthetic construct
  source 1..14: note = Seed: PPFLWMGYELHPDK; note = HLAs: DPA10103-DPB10101 DPA10103-DPB10201 DPA10103-DPB10202 DPA10103-DPB10401 DPA10103-DPB112601 DPA10103-DPB11501 DPA10103-DPB11601 DPA10103-DPB11901 DPA10103-DPB12301 DPA10103-DPB13101 DPA10103-DPB13401 DPA10103-DPB13901 DPA10103-DPB14001 DPA10103-DPB14101 DPA10103-DPB14801 DPA10103-DPB15001 DPA10103-DPB15901 DPA10104-DPB10101 DPA10104-DPB11501 DPA10105-DPB10101 DPA10105-DPB10401 DPA10105-DPB15001 DPA10106-DPB10101 DPA10201-DPB10101 DPA10201-DPB110601 DPA10201-DPB11501 DPA10201-DPB11601 DPA10201-DPB11901 DPA10202-DPB10101 DPA10202-DPB10201 DPA10202-DPB10202 DPA10202-DPB10401 DPA10202-DPB110601 DPA10202-DPB11901 DPA10202-DPB13101 DPA10202-DPB16501 DPA10301-DPB10101 DPA10301-DPB10201 DPA10301-DPB10202 DPA10301-DPB10401 DPA10301-DPB10402 DPA10301-DPB110501 DPA10301-DPB110601 DPA10301-DPB11801 DPA10301-DPB12301 DPA10301-DPB13901 DPA10301-DPB14001 DPA10301-DPB14901 DPA10301-DPB15501 DPA10301-DPB16501 DPA10301-DPB17501 DPA10301-DPB18001 DPA10401-DPB10101 DPA10401-DPB10201; note = HLAs: DPA10401-DPB10202 DPA10401-DPB10402 DPA10401-DPB10501 DPA10401-DPB110501 DPA10401-DPB14901
PPFLWTGFELKPDK

SEQ ID NO: 6825 - protein, 14 aa, synthetic construct
  source 1..14: note = Seed: PPFLWMGYELHPDK; note = HLAs: DRB1_1001 DPA10103-DPB10101 DPA10103-DPB10201 DPA10103-DPB10202 DPA10103-DPB10401 DPA10103-DPB112601 DPA10103-DPB11501 DPA10103-DPB11601 DPA10103-DPB11901 DPA10103-DPB12301 DPA10103-DPB13101 DPA10103-DPB13401 DPA10103-DPB13901 DPA10103-DPB14001 DPA10103-DPB14101 DPA10103-DPB14801 DPA10103-DPB15001 DPA10103-DPB15901 DPA10104-DPB10101 DPA10104-DPB11501 DPA10105-DPB10101 DPA10105-DPB10401 DPA10105-DPB15001 DPA10106-DPB10101 DPA10201-DPB10101 DPA10201-DPB110601 DPA10201-DPB11501 DPA10201-DPB11601 DPA10201-DPB11901 DPA10202-DPB10101 DPA10202-DPB10201 DPA10202-DPB10202 DPA10202-DPB10401 DPA10202-DPB110601 DPA10202-DPB11901 DPA10202-DPB13101 DPA10202-DPB16501 DPA10301-DPB10101 DPA10301-DPB10201 DPA10301-DPB10202 DPA10301-DPB10401 DPA10301-DPB10402 DPA10301-DPB110501 DPA10301-DPB110601 DPA10301-DPB11801 DPA10301-DPB12301 DPA10301-DPB13901 DPA10301-DPB14001 DPA10301-DPB14901 DPA10301-DPB15501 DPA10301-DPB16501 DPA10301-DPB17501 DPA10301-DPB18001 DPA10401-DPB10101 DPA10401-DPB10201; note = HLAs: DPA10401-DPB10202 DPA10401-DPB10402 DPA10401-DPB10501 DPA10401-DPB110501 DPA10401-DPB14901
PPFLWAGIELIPDK

SEQ ID NO: 6826 - protein, 14 aa, synthetic construct
  source 1..14: note = Seed: PPFLWMGYELHPDK; note = HLAs: DPA10103-DPB10201 DPA10103-DPB10202 DPA10103-DPB11501 DPA10103-DPB14801 DPA10104-DPB11501 DPA10201-DPB110601 DPA10201-DPB11501 DPA10201-DPB11601 DPA10201-DPB11901 DPA10202-DPB10201 DPA10202-DPB10202 DPA10202-DPB110601 DPA10202-DPB11901 DPA10301-DPB10201 DPA10301-DPB10202 DPA10301-DPB11801 DPA10301-DPB14001 DPA10401-DPB10201 DPA10401-DPB10202
PPFLWYGVELLPDK

SEQ ID NO: 6827 - protein, 20 aa, synthetic construct
  source 1..20: note = Seed: KEPPFLWMGYELHPDKWTVQ; note = HLAs: DRB1_0101 DPA10103-DPB10101 DPA10103-DPB10201 DPA10103-DPB10202 DPA10103-DPB10401 DPA10103-DPB10402 DPA10103-DPB10501 DPA10103-DPB110501 DPA10103-DPB112601 DPA10103-DPB11501 DPA10103-DPB11601 DPA10103-DPB11801 DPA10103-DPB11901 DPA10103-DPB12301 DPA10103-DPB13101 DPA10103-DPB13401 DPA10103-DPB13901 DPA10103-DPB14001 DPA10103-DPB14101 DPA10103-DPB14801 DPA10103-DPB14901 DPA10103-DPB15001 DPA10103-DPB15101 DPA10103-DPB15501 DPA10103-DPB15901 DPA10103-DPB18001 DPA10104-DPB10101 DPA10104-DPB11501 DPA10105-DPB10101 DPA10105-DPB10401 DPA10105-DPB11801 DPA10105-DPB15001 DPA10106-DPB10101 DPA10201-DPB10101 DPA10201-DPB10201 DPA10201-DPB10202 DPA10201-DPB10401 DPA10201-DPB10501 DPA10201-DPB110601 DPA10201-DPB11501 DPA10201-DPB11601 DPA10201-DPB11901 DPA10201-DPB13401 DPA10201-DPB15501 DPA10202-DPB10101 DPA10202-DPB10201 DPA10202-DPB10202 DPA10202-DPB10401 DPA10202-DPB10501 DPA10202-DPB110601 DPA10202-DPB11101 DPA10202-DPB11301 DPA10202-DPB11801 DPA10202-DPB11901 DPA10202-DPB13101; note = HLAs: DPA10202-DPB13801 DPA10202-DPB15501 DPA10202-DPB16501 DPA10301-DPB10101 DPA10301-DPB10201 DPA10301-DPB10202 DPA10301-DPB10401 DPA10301-DPB10402 DPA10301-DPB110501 DPA10301-DPB110601 DPA10301-DPB11101 DPA10301-DPB11301 DPA10301-DPB11801 DPA10301-DPB12301 DPA10301-DPB13901 DPA10301-DPB14001 DPA10301-DPB14901 DPA10301-DPB15501 DPA10301-DPB16501 DPA10301-DPB17501 DPA10301-DPB18001 DPA10401-DPB10101 DPA10401-DPB10201 DPA10401-DPB10202 DPA10401-DPB10402 DPA10401-DPB10501 DPA10401-DPB110501 DPA10401-DPB14901
KEPPFLWHGLELMPDKWTVQ

SEQ ID NO: 6828 - protein, 20 aa, synthetic construct
  source 1..20: note = Seed: KEPPFLWMGYELHPDKWTVQ; note = HLAs: DPA10103-DPB10101 DPA10103-DPB10201 DPA10103-DPB10202 DPA10103-DPB10401 DPA10103-DPB10402 DPA10103-DPB10501 DPA10103-DPB110501 DPA10103-DPB112601 DPA10103-DPB11501 DPA10103-DPB11601 DPA10103-DPB11801 DPA10103-DPB11901 DPA10103-DPB12301 DPA10103-DPB13101 DPA10103-DPB13401 DPA10103-DPB13901 DPA10103-DPB14001 DPA10103-DPB14101 DPA10103-DPB14801 DPA10103-DPB14901 DPA10103-DPB15001 DPA10103-DPB15101 DPA10103-DPB15501 DPA10103-DPB15901 DPA10103-DPB18001 DPA10104-DPB10101 DPA10104-DPB11501 DPA10105-DPB10101 DPA10105-DPB10401 DPA10105-DPB11801 DPA10105-DPB15001 DPA10106-DPB10101 DPA10201-DPB10101 DPA10201-DPB10201 DPA10201-DPB10202 DPA10201-DPB10401 DPA10201-DPB10501 DPA10201-DPB110601 DPA10201-DPB11501 DPA10201-DPB11601 DPA10201-DPB11901 DPA10201-DPB13401 DPA10201-DPB15501 DPA10202-DPB10101 DPA10202-DPB10201 DPA10202-DPB10202 DPA10202-DPB10401 DPA10202-DPB10501 DPA10202-DPB110601 DPA10202-DPB11101 DPA10202-DPB11301 DPA10202-DPB11801 DPA10202-DPB11901 DPA10202-DPB13101 DPA10202-DPB13801; note = HLAs: DPA10202-DPB15501 DPA10202-DPB16501 DPA10301-DPB10101 DPA10301-DPB10201 DPA10301-DPB10202 DPA10301-DPB10401 DPA10301-DPB10402 DPA10301-DPB110501 DPA10301-DPB110601 DPA10301-DPB11101 DPA10301-DPB11301 DPA10301-DPB11801 DPA10301-DPB12301 DPA10301-DPB13901 DPA10301-DPB14001 DPA10301-DPB14901 DPA10301-DPB15501 DPA10301-DPB16501 DPA10301-DPB17501 DPA10301-DPB18001 DPA10401-DPB10101 DPA10401-DPB10201 DPA10401-DPB10202 DPA10401-DPB10402 DPA10401-DPB10501 DPA10401-DPB110501 DPA10401-DPB14901
KEPPFLWDGFELFPDKWTVQ

SEQ ID NO: 6829 - protein, 14 aa, synthetic construct
  source 1..14: note = Seed: PPFLWMGYELHPDK; note = HLAs: DPA10103-DPB10101 DPA10103-DPB10201 DPA10103-DPB10202 DPA10103-DPB10401 DPA10103-DPB112601 DPA10103-DPB11501 DPA10103-DPB11601 DPA10103-DPB11901 DPA10103-DPB12301 DPA10103-DPB13101 DPA10103-DPB13401 DPA10103-DPB13901 DPA10103-DPB14001 DPA10103-DPB14101 DPA10103-DPB14801 DPA10103-DPB15001 DPA10103-DPB15901 DPA10104-DPB10101 DPA10104-DPB11501 DPA10105-DPB10101 DPA10105-DPB10401 DPA10105-DPB15001 DPA10106-DPB10101 DPA10201-DPB10101 DPA10201-DPB110601 DPA10201-DPB11501 DPA10201-DPB11601 DPA10201-DPB11901 DPA10202-DPB10101 DPA10202-DPB10201 DPA10202-DPB10202 DPA10202-DPB10401 DPA10202-DPB110601 DPA10202-DPB11901 DPA10202-DPB13101 DPA10202-DPB16501 DPA10301-DPB10101 DPA10301-DPB10201 DPA10301-DPB10202 DPA10301-DPB10401 DPA10301-DPB10402 DPA10301-DPB110501 DPA10301-DPB110601 DPA10301-DPB11801 DPA10301-DPB12301 DPA10301-DPB13901 DPA10301-DPB14001 DPA10301-DPB14901 DPA10301-DPB15501 DPA10301-DPB16501 DPA10301-DPB17501 DPA10301-DPB18001 DPA10401-DPB10101 DPA10401-DPB10201; note = HLAs: DPA10401-DPB10202 DPA10401-DPB10402 DPA10401-DPB10501 DPA10401-DPB110501 DPA10401-DPB14901
PPCLWTGFELIPDK

SEQ ID NO: 6830 - protein, 20 aa, synthetic construct
  source 1..20: note = Seed: KEPPFLWMGYELHPDKWTVQ; note = HLAs: DPA10103-DPB10101 DPA10103-DPB10201 DPA10103-DPB10202 DPA10103-DPB10401 DPA10103-DPB10402 DPA10103-DPB10501 DPA10103-DPB110501 DPA10103-DPB112601 DPA10103-DPB11501 DPA10103-DPB11601 DPA10103-DPB11801 DPA10103-DPB11901 DPA10103-DPB12301 DPA10103-DPB13101 DPA10103-DPB13401 DPA10103-DPB13901 DPA10103-DPB14001 DPA10103-DPB14101 DPA10103-DPB14801 DPA10103-DPB14901 DPA10103-DPB15001 DPA10103-DPB15101 DPA10103-DPB15501 DPA10103-DPB15901 DPA10103-DPB18001 DPA10104-DPB10101 DPA10104-DPB11501 DPA10105-DPB10101 DPA10105-DPB10401 DPA10105-DPB11801 DPA10105-DPB15001 DPA10106-DPB10101 DPA10201-DPB10101 DPA10201-DPB10201 DPA10201-DPB10202 DPA10201-DPB10401 DPA10201-DPB10501 DPA10201-DPB110601 DPA10201-DPB11501 DPA10201-DPB11601 DPA10201-DPB11901 DPA10201-DPB13401 DPA10201-DPB15501 DPA10202-DPB10101 DPA10202-DPB10201 DPA10202-DPB10202 DPA10202-DPB10401 DPA10202-DPB10501 DPA10202-DPB110601 DPA10202-DPB11101 DPA10202-DPB11301 DPA10202-DPB11801 DPA10202-DPB11901 DPA10202-DPB13101 DPA10202-DPB13801; note = HLAs: DPA10202-DPB15501 DPA10202-DPB16501 DPA10301-DPB10101 DPA10301-DPB10201 DPA10301-DPB10202 DPA10301-DPB10401 DPA10301-DPB10402 DPA10301-DPB110501 DPA10301-DPB110601 DPA10301-DPB11101 DPA10301-DPB11301 DPA10301-DPB11801 DPA10301-DPB12301 DPA10301-DPB13901 DPA10301-DPB14001 DPA10301-DPB14901 DPA10301-DPB15501 DPA10301-DPB16501 DPA10301-DPB17501 DPA10301-DPB18001 DPA10401-DPB10101 DPA10401-DPB10201 DPA10401-DPB10202 DPA10401-DPB10402 DPA10401-DPB10501 DPA10401-DPB110501 DPA10401-DPB14901
KEPPFLWPGFELIPDKWTVQ

SEQ ID NO: 6831 - protein, 14 aa, synthetic construct
  source 1..14: note = Seed: PPFLWMGYELHPDK; note = HLAs: DRB1_1001 DPA10103-DPB10101 DPA10103-DPB10201 DPA10103-DPB10202 DPA10103-DPB10401 DPA10103-DPB112601 DPA10103-DPB11501 DPA10103-DPB11601 DPA10103-DPB11901 DPA10103-DPB12301 DPA10103-DPB13101 DPA10103-DPB13401 DPA10103-DPB13901 DPA10103-DPB14001 DPA10103-DPB14101 DPA10103-DPB14801 DPA10103-DPB15001 DPA10103-DPB15901 DPA10104-DPB10101 DPA10104-DPB11501 DPA10105-DPB10101 DPA10105-DPB10401 DPA10105-DPB15001 DPA10106-DPB10101 DPA10201-DPB10101 DPA10201-DPB110601 DPA10201-DPB11501 DPA10201-DPB11601 DPA10201-DPB11901 DPA10202-DPB10101 DPA10202-DPB10201 DPA10202-DPB10202 DPA10202-DPB10401 DPA10202-DPB110601 DPA10202-DPB11901 DPA10202-DPB13101 DPA10202-DPB16501 DPA10301-DPB10101 DPA10301-DPB10201 DPA10301-DPB10202 DPA10301-DPB10401 DPA10301-DPB10402 DPA10301-DPB110501 DPA10301-DPB110601 DPA10301-DPB11801 DPA10301-DPB12301 DPA10301-DPB13901 DPA10301-DPB14001 DPA10301-DPB14901 DPA10301-DPB15501 DPA10301-DPB16501 DPA10301-DPB17501 DPA10301-DPB18001 DPA10401-DPB10101 DPA10401-DPB10201; note = HLAs: DPA10401-DPB10202 DPA10401-DPB10402 DPA10401-DPB10501 DPA10401-DPB110501 DPA10401-DPB14901
PPFLWEGIELVPDK

SEQ ID NO: 6832 - protein, 20 aa, synthetic construct
  source 1..20: note = Seed: KEPPFLWMGYELHPDKWTVQ; note = HLAs: DRB1_0101 DRB1_1001 DPA10103-DPB10201 DPA10103-DPB10202 DPA10103-DPB10401 DPA10103-DPB10402 DPA10103-DPB10501 DPA10103-DPB110501 DPA10103-DPB112601 DPA10103-DPB11501 DPA10103-DPB11601 DPA10103-DPB11801 DPA10103-DPB11901 DPA10103-DPB12301 DPA10103-DPB13101 DPA10103-DPB13401 DPA10103-DPB13901 DPA10103-DPB14001 DPA10103-DPB14101 DPA10103-DPB14801 DPA10103-DPB14901 DPA10103-DPB15001 DPA10103-DPB15101 DPA10103-DPB15501 DPA10103-DPB15901 DPA10103-DPB18001 DPA10104-DPB11501 DPA10105-DPB10401 DPA10105-DPB11801 DPA10105-DPB15001 DPA10106-DPB10101 DPA10201-DPB10101 DPA10201-DPB10201 DPA10201-DPB10202 DPA10201-DPB10401 DPA10201-DPB10501 DPA10201-DPB110601 DPA10201-DPB11501 DPA10201-DPB11601 DPA10201-DPB11901 DPA10201-DPB13401 DPA10201-DPB15501 DPA10202-DPB10101 DPA10202-DPB10201 DPA10202-DPB10202 DPA10202-DPB10401 DPA10202-DPB10501 DPA10202-DPB110601 DPA10202-DPB11101 DPA10202-DPB11301 DPA10202-DPB11801 DPA10202-DPB11901 DPA10202-DPB13101 DPA10202-DPB13801 DPA10202-DPB15501; note = HLAs: DPA10202-DPB16501 DPA10301-DPB10101 DPA10301-DPB10201 DPA10301-DPB10202 DPA10301-DPB10401 DPA10301-DPB10402 DPA10301-DPB110501 DPA10301-DPB110601 DPA10301-DPB11301 DPA10301-DPB11801 DPA10301-DPB12301 DPA10301-DPB13901 DPA10301-DPB14001 DPA10301-DPB14901 DPA10301-DPB15501 DPA10301-DPB17501 DPA10301-DPB18001 DPA10401-DPB10201 DPA10401-DPB10202 DPA10401-DPB10402 DPA10401-DPB10501 DPA10401-DPB110501 DPA10401-DPB14901
KEPPFLWHGVELLPDKWTVQ

SEQ ID NO: 6833 - protein, 20 aa, synthetic construct
  source 1..20: note = Seed: KEPPFLWMGYELHPDKWTVQ; note = HLAs: DRB1_0101 DRB1_0405 DRB1_1001 DPA10103-DPB10101 DPA10103-DPB10201 DPA10103-DPB10202 DPA10103-DPB10401 DPA10103-DPB10402 DPA10103-DPB10501 DPA10103-DPB110501 DPA10103-DPB112601 DPA10103-DPB11501 DPA10103-DPB11601 DPA10103-DPB11801 DPA10103-DPB11901 DPA10103-DPB12301 DPA10103-DPB13101 DPA10103-DPB13401 DPA10103-DPB13901 DPA10103-DPB14001 DPA10103-DPB14101 DPA10103-DPB14801 DPA10103-DPB14901 DPA10103-DPB15101 DPA10103-DPB15501 DPA10103-DPB15901 DPA10103-DPB18001 DPA10104-DPB10101 DPA10104-DPB11501 DPA10105-DPB10101 DPA10105-DPB10401 DPA10105-DPB11801 DPA10106-DPB10101 DPA10201-DPB10101 DPA10201-DPB10201 DPA10201-DPB10202 DPA10201-DPB10401 DPA10201-DPB10501 DPA10201-DPB110601 DPA10201-DPB11501 DPA10201-DPB11601 DPA10201-DPB11901 DPA10201-DPB13401 DPA10201-DPB15501 DPA10202-DPB10101 DPA10202-DPB10201 DPA10202-DPB10202 DPA10202-DPB10401 DPA10202-DPB10501 DPA10202-DPB110601 DPA10202-DPB11101 DPA10202-DPB11301 DPA10202-DPB11801 DPA10202-DPB11901 DPA10202-DPB13101 DPA10202-DPB13801; note = HLAs: DPA10202-DPB15501 DPA10202-DPB16501 DPA10301-DPB10101 DPA10301-DPB10201 DPA10301-DPB10202 DPA10301-DPB10401 DPA10301-DPB10402 DPA10301-DPB110501 DPA10301-DPB110601 DPA10301-DPB11101 DPA10301-DPB11301 DPA10301-DPB11801 DPA10301-DPB12301 DPA10301-DPB13901 DPA10301-DPB14001 DPA10301-DPB14901 DPA10301-DPB15501 DPA10301-DPB16501 DPA10301-DPB17501 DPA10301-DPB18001 DPA10401-DPB10201 DPA10401-DPB10202 DPA10401-DPB10402 DPA10401-DPB10501 DPA10401-DPB110501 DPA10401-DPB14901
KEPPFLWIGAELLPDKWTVQ

SEQ ID NO: 6834 - protein, 14 aa, synthetic construct
  source 1..14: note = Seed: PPFLWMGYELHPDK; note = HLAs: DPA10103-DPB10101 DPA10103-DPB10201 DPA10103-DPB10202 DPA10103-DPB10401 DPA10103-DPB112601 DPA10103-DPB11501 DPA10103-DPB11601 DPA10103-DPB11901 DPA10103-DPB12301 DPA10103-DPB13101 DPA10103-DPB13401 DPA10103-DPB13901 DPA10103-DPB14001 DPA10103-DPB14101 DPA10103-DPB14801 DPA10103-DPB15001 DPA10103-DPB15901 DPA10104-DPB10101 DPA10104-DPB11501 DPA10105-DPB10101 DPA10105-DPB10401 DPA10105-DPB15001 DPA10106-DPB10101 DPA10201-DPB10101 DPA10201-DPB110601 DPA10201-DPB11501 DPA10201-DPB11601 DPA10201-DPB11901 DPA10202-DPB10101 DPA10202-DPB10201 DPA10202-DPB10202 DPA10202-DPB10401 DPA10202-DPB110601 DPA10202-DPB11901 DPA10202-DPB13101 DPA10202-DPB16501 DPA10301-DPB10101 DPA10301-DPB10201 DPA10301-DPB10202 DPA10301-DPB10401 DPA10301-DPB10402 DPA10301-DPB110501 DPA10301-DPB110601 DPA10301-DPB11801 DPA10301-DPB12301 DPA10301-DPB13901 DPA10301-DPB14001 DPA10301-DPB14901 DPA10301-DPB15501 DPA10301-DPB16501 DPA10301-DPB17501 DPA10301-DPB18001 DPA10401-DPB10101 DPA10401-DPB10201; note = HLAs: DPA10401-DPB10202 DPA10401-DPB10402 DPA10401-DPB10501 DPA10401-DPB110501 DPA10401-DPB14901
PPFLWVGMELLPDK

SEQ ID NO: 6835 - protein, 20 aa, synthetic construct
  source 1..20: note = Seed: KEPPFLWMGYELHPDKWTVQ; note = HLAs: DPA10103-DPB10101 DPA10103-DPB10201 DPA10103-DPB10202 DPA10103-DPB10401 DPA10103-DPB10402 DPA10103-DPB10501 DPA10103-DPB110501 DPA10103-DPB112601 DPA10103-DPB11501 DPA10103-DPB11601 DPA10103-DPB11801 DPA10103-DPB11901 DPA10103-DPB12301 DPA10103-DPB13101 DPA10103-DPB13401 DPA10103-DPB13901 DPA10103-DPB14001 DPA10103-DPB14101 DPA10103-DPB14801 DPA10103-DPB14901 DPA10103-DPB15001 DPA10103-DPB15101 DPA10103-DPB15501 DPA10103-DPB15901 DPA10103-DPB18001 DPA10104-DPB10101 DPA10104-DPB11501 DPA10105-DPB10101 DPA10105-DPB10401 DPA10105-DPB11801 DPA10105-DPB15001 DPA10106-DPB10101 DPA10201-DPB10101 DPA10201-DPB10201 DPA10201-DPB10202 DPA10201-DPB10401 DPA10201-DPB10501 DPA10201-DPB110601 DPA10201-DPB11501 DPA10201-DPB11601 DPA10201-DPB11901 DPA10201-DPB13401 DPA10201-DPB15501 DPA10202-DPB10101 DPA10202-DPB10201 DPA10202-DPB10202 DPA10202-DPB10401 DPA10202-DPB10501 DPA10202-DPB110601 DPA10202-DPB11101 DPA10202-DPB11301 DPA10202-DPB11801 DPA10202-DPB11901 DPA10202-DPB13101 DPA10202-DPB13801; note = HLAs: DPA10202-DPB15501 DPA10202-DPB16501 DPA10301-DPB10101 DPA10301-DPB10201 DPA10301-DPB10202 DPA10301-DPB10401 DPA10301-DPB10402 DPA10301-DPB110501 DPA10301-DPB110601 DPA10301-DPB11301 DPA10301-DPB11801 DPA10301-DPB12301 DPA10301-DPB13901 DPA10301-DPB14001 DPA10301-DPB14901 DPA10301-DPB16501 DPA10301-DPB17501 DPA10301-DPB18001 DPA10401-DPB10101 DPA10401-DPB10201 DPA10401-DPB10202 DPA10401-DPB10402 DPA10401-DPB10501 DPA10401-DPB110501 DPA10401-DPB14901
KEPPMLWQGFELLPDKWTVQ

SEQ ID NO: 6836 - protein, 20 aa, synthetic construct
  source 1..20: note = Seed: KEPPFLWMGYELHPDKWTVQ; note = HLAs: DPA10103-DPB10101 DPA10103-DPB10201 DPA10103-DPB10202 DPA10103-DPB10401 DPA10103-DPB10402 DPA10103-DPB10501 DPA10103-DPB110501 DPA10103-DPB112601 DPA10103-DPB11501 DPA10103-DPB11601 DPA10103-DPB11801 DPA10103-DPB11901 DPA10103-DPB12301 DPA10103-DPB13101 DPA10103-DPB13401 DPA10103-DPB13901 DPA10103-DPB14001 DPA10103-DPB14101 DPA10103-DPB14801 DPA10103-DPB14901 DPA10103-DPB15001 DPA10103-DPB15101 DPA10103-DPB15501 DPA10103-DPB15901 DPA10103-DPB18001 DPA10104-DPB10101 DPA10104-DPB11501 DPA10105-DPB10101 DPA10105-DPB10401 DPA10105-DPB11801 DPA10105-DPB15001 DPA10106-DPB10101 DPA10201-DPB10101 DPA10201-DPB10201 DPA10201-DPB10202 DPA10201-DPB10401 DPA10201-DPB10501 DPA10201-DPB110601 DPA10201-DPB11501 DPA10201-DPB11601 DPA10201-DPB11901 DPA10201-DPB13401 DPA10201-DPB15501 DPA10202-DPB10101 DPA10202-DPB10201 DPA10202-DPB10202 DPA10202-DPB10401 DPA10202-DPB10501 DPA10202-DPB110601 DPA10202-DPB11101 DPA10202-DPB11301 DPA10202-DPB11801 DPA10202-DPB11901 DPA10202-DPB13101 DPA10202-DPB13801; note = HLAs: DPA10202-DPB15501 DPA10202-DPB16501 DPA10301-DPB10101 DPA10301-DPB10201 DPA10301-DPB10202 DPA10301-DPB10401 DPA10301-DPB10402 DPA10301-DPB110501 DPA10301-DPB110601 DPA10301-DPB11101 DPA10301-DPB11301 DPA10301-DPB11801 DPA10301-DPB12301 DPA10301-DPB13901 DPA10301-DPB14001 DPA10301-DPB14901 DPA10301-DPB15501 DPA10301-DPB16501 DPA10301-DPB17501 DPA10301-DPB18001 DPA10401-DPB10101 DPA10401-DPB10201 DPA10401-DPB10202 DPA10401-DPB10402 DPA10401-DPB10501 DPA10401-DPB110501 DPA10401-DPB14901
KEPPMLWIGFELLPDKWTVQ

SEQ ID NO: 6837 - protein, 14 aa, synthetic construct
  source 1..14: note = Seed: PPFLWMGYELHPDK; note = HLAs: DPA10103-DPB10101 DPA10103-DPB10201 DPA10103-DPB10202 DPA10103-DPB10401 DPA10103-DPB112601 DPA10103-DPB11501 DPA10103-DPB11601 DPA10103-DPB11901 DPA10103-DPB12301 DPA10103-DPB13101 DPA10103-DPB13401 DPA10103-DPB13901 DPA10103-DPB14001 DPA10103-DPB14101 DPA10103-DPB14801 DPA10103-DPB15001 DPA10103-DPB15901 DPA10104-DPB10101 DPA10104-DPB11501 DPA10105-DPB10101 DPA10105-DPB10401 DPA10105-DPB15001 DPA10106-DPB10101 DPA10201-DPB10101 DPA10201-DPB110601 DPA10201-DPB11501 DPA10201-DPB11601 DPA10201-DPB11901 DPA10202-DPB10101 DPA10202-DPB10201 DPA10202-DPB10202 DPA10202-DPB10401 DPA10202-DPB110601 DPA10202-DPB11901 DPA10202-DPB13101 DPA10202-DPB16501 DPA10301-DPB10101 DPA10301-DPB10201 DPA10301-DPB10202 DPA10301-DPB10401 DPA10301-DPB10402 DPA10301-DPB110501 DPA10301-DPB110601 DPA10301-DPB11801 DPA10301-DPB12301 DPA10301-DPB13901 DPA10301-DPB14001 DPA10301-DPB14901 DPA10301-DPB15501 DPA10301-DPB16501 DPA10301-DPB17501 DPA10301-DPB18001 DPA10401-DPB10101 DPA10401-DPB10201; note = HLAs: DPA10401-DPB10202 DPA10401-DPB10402 DPA10401-DPB10501 DPA10401-DPB110501 DPA10401-DPB14901
PPFLWTGWELTPDK

SEQ ID NO: 6838 - protein, 20 aa, synthetic construct
  source 1..20: note = Seed: KEPPFLWMGYELHPDKWTVQ; note = HLAs: DPA10103-DPB10101 DPA10103-DPB10201 DPA10103-DPB10202 DPA10103-DPB10401 DPA10103-DPB10402 DPA10103-DPB10501 DPA10103-DPB110501 DPA10103-DPB112601 DPA10103-DPB11501 DPA10103-DPB11601 DPA10103-DPB11801 DPA10103-DPB11901 DPA10103-DPB12301 DPA10103-DPB13101 DPA10103-DPB13401 DPA10103-DPB13901 DPA10103-DPB14001 DPA10103-DPB14101 DPA10103-DPB14801 DPA10103-DPB14901 DPA10103-DPB15001 DPA10103-DPB15101 DPA10103-DPB15501 DPA10103-DPB15901 DPA10103-DPB18001 DPA10104-DPB10101 DPA10104-DPB11501 DPA10105-DPB10101 DPA10105-DPB10401 DPA10105-DPB11801 DPA10105-DPB15001 DPA10106-DPB10101 DPA10201-DPB10101 DPA10201-DPB10201 DPA10201-DPB10202 DPA10201-DPB10401 DPA10201-DPB10501 DPA10201-DPB110601 DPA10201-DPB11501 DPA10201-DPB11601 DPA10201-DPB11901 DPA10201-DPB13401 DPA10201-DPB15501 DPA10202-DPB10101 DPA10202-DPB10201 DPA10202-DPB10202 DPA10202-DPB10401 DPA10202-DPB10501 DPA10202-DPB110601 DPA10202-DPB11101 DPA10202-DPB11301 DPA10202-DPB11801 DPA10202-DPB11901 DPA10202-DPB13101 DPA10202-DPB13801; note = HLAs: DPA10202-DPB15501 DPA10202-DPB16501 DPA10301-DPB10101 DPA10301-DPB10201 DPA10301-DPB10202 DPA10301-DPB10401 DPA10301-DPB10402 DPA10301-DPB110501 DPA10301-DPB110601 DPA10301-DPB11101 DPA10301-DPB11301 DPA10301-DPB11801 DPA10301-DPB12301 DPA10301-DPB13901 DPA10301-DPB14001 DPA10301-DPB14901 DPA10301-DPB15501 DPA10301-DPB16501 DPA10301-DPB17501 DPA10301-DPB18001 DPA10401-DPB10101 DPA10401-DPB10201 DPA10401-DPB10202 DPA10401-DPB10402 DPA10401-DPB10501 DPA10401-DPB110501 DPA10401-DPB14901
KEPPFLWKGFELTPDKWTVQ

SEQ ID NO: 6839 - protein, 20 aa, synthetic construct
  source 1..20: note = Seed: KEPPFLWMGYELHPDKWTVQ; note = HLAs: DRB1_1602 DQA10101-DQB10501 DQA10101-DQB10503 DQA10102-DQB10501 DQA10102-DQB10502 DQA10102-DQB10503 DQA10103-DQB10501 DQA10104-DQB10501 DQA10104-DQB10503 DQA10105-DQB10501 DQA10107-DQB10503 DQA10505-DQB10402
KEPPFLLMGFEAHPVKWTVQ

SEQ ID NO: 6840 - protein, 14 aa, synthetic construct
  source 1..14: note = Seed: PPFLWMGYELHPDK; note = HLAs: DRB1_1001 DPA10103-DPB10101 DPA10103-DPB10201 DPA10103-DPB10202 DPA10103-DPB10401 DPA10103-DPB112601 DPA10103-DPB11501 DPA10103-DPB11601 DPA10103-DPB11901 DPA10103-DPB12301 DPA10103-DPB13101 DPA10103-DPB13401 DPA10103-DPB13901 DPA10103-DPB14001 DPA10103-DPB14101 DPA10103-DPB14801 DPA10103-DPB15001 DPA10103-DPB15901 DPA10104-DPB10101 DPA10104-DPB11501 DPA10105-DPB10101 DPA10105-DPB10401 DPA10105-DPB15001 DPA10106-DPB10101 DPA10201-DPB10101 DPA10201-DPB110601 DPA10201-DPB11501 DPA10201-DPB11601 DPA10201-DPB11901 DPA10202-DPB10101 DPA10202-DPB10201 DPA10202-DPB10202 DPA10202-DPB10401 DPA10202-DPB110601 DPA10202-DPB11901 DPA10202-DPB13101 DPA10202-DPB16501 DPA10301-DPB10101 DPA10301-DPB10201 DPA10301-DPB10202 DPA10301-DPB10401 DPA10301-DPB10402 DPA10301-DPB110501 DPA10301-DPB110601 DPA10301-DPB11801 DPA10301-DPB12301 DPA10301-DPB13901 DPA10301-DPB14001 DPA10301-DPB14901 DPA10301-DPB15501 DPA10301-DPB16501 DPA10301-DPB17501 DPA10301-DPB18001 DPA10401-DPB10101 DPA10401-DPB10201; note = HLAs: DPA10401-DPB10202 DPA10401-DPB10402 DPA10401-DPB10501 DPA10401-DPB110501 DPA10401-DPB14901
PPFLWAGMELLPDK

SEQ ID NO: 6841 - protein, 14 aa, synthetic construct
  source 1..14: note = Seed: PPFLWMGYELHPDK; note = HLAs: DPA10103-DPB10101 DPA10103-DPB10201 DPA10103-DPB10202 DPA10103-DPB10401 DPA10103-DPB112601 DPA10103-DPB11501 DPA10103-DPB11601 DPA10103-DPB11901 DPA10103-DPB12301 DPA10103-DPB13101 DPA10103-DPB13401 DPA10103-DPB13901 DPA10103-DPB14001 DPA10103-DPB14101 DPA10103-DPB14801 DPA10103-DPB15001 DPA10103-DPB15901 DPA10104-DPB10101 DPA10104-DPB11501 DPA10105-DPB10101 DPA10105-DPB10401 DPA10105-DPB15001 DPA10106-DPB10101 DPA10201-DPB10101 DPA10201-DPB110601 DPA10201-DPB11501 DPA10201-DPB11601 DPA10201-DPB11901 DPA10202-DPB10101 DPA10202-DPB10201 DPA10202-DPB10202 DPA10202-DPB10401 DPA10202-DPB110601 DPA10202-DPB11901 DPA10202-DPB13101 DPA10202-DPB16501 DPA10301-DPB10101 DPA10301-DPB10201 DPA10301-DPB10202 DPA10301-DPB10401 DPA10301-DPB10402 DPA10301-DPB110501 DPA10301-DPB110601 DPA10301-DPB11801 DPA10301-DPB12301 DPA10301-DPB13901 DPA10301-DPB14001 DPA10301-DPB14901 DPA10301-DPB15501 DPA10301-DPB16501 DPA10301-DPB17501 DPA10301-DPB18001 DPA10401-DPB10101 DPA10401-DPB10201; note = HLAs: DPA10401-DPB10202 DPA10401-DPB10402 DPA10401-DPB10501 DPA10401-DPB110501 DPA10401-DPB14901
PPFLWEGYELMPDK

SEQ ID NO: 6842 - protein, 14 aa, synthetic construct
  source 1..14: note = Seed: PPFLWMGYELHPDK; note = HLAs: DRB1_1001 DPA10103-DPB10201 DPA10103-DPB10202 DPA10103-DPB10401 DPA10103-DPB112601 DPA10103-DPB11501 DPA10103-DPB11601 DPA10103-DPB11901 DPA10103-DPB12301 DPA10103-DPB13401 DPA10103-DPB13901 DPA10103-DPB14001 DPA10103-DPB14101 DPA10103-DPB14801 DPA10103-DPB15901 DPA10104-DPB11501 DPA10105-DPB10401 DPA10106-DPB10101 DPA10201-DPB10101 DPA10201-DPB110601 DPA10201-DPB11501 DPA10201-DPB11601 DPA10201-DPB11901 DPA10202-DPB10101 DPA10202-DPB10201 DPA10202-DPB10202 DPA10202-DPB10401 DPA10202-DPB110601 DPA10202-DPB11901 DPA10202-DPB13101 DPA10202-DPB16501 DPA10301-DPB10101 DPA10301-DPB10201 DPA10301-DPB10202 DPA10301-DPB10401 DPA10301-DPB10402 DPA10301-DPB110501 DPA10301-DPB110601 DPA10301-DPB11801 DPA10301-DPB12301 DPA10301-DPB13901 DPA10301-DPB14001 DPA10301-DPB14901 DPA10301-DPB15501 DPA10301-DPB16501 DPA10301-DPB17501 DPA10301-DPB18001 DPA10401-DPB10201 DPA10401-DPB10202 DPA10401-DPB10402 DPA10401-DPB10501 DPA10401-DPB110501 DPA10401-DPB14901
PPFLWFGIELIPDK

SEQ ID NO: 6843 - protein, 20 aa, synthetic construct
  source 1..20: note = Seed: KEPPFLWMGYELHPDKWTVQ; note = HLAs: DPA10103-DPB10101 DPA10103-DPB10201 DPA10103-DPB10202 DPA10103-DPB10401 DPA10103-DPB10402 DPA10103-DPB10501 DPA10103-DPB110501 DPA10103-DPB112601 DPA10103-DPB11501 DPA10103-DPB11601 DPA10103-DPB11801 DPA10103-DPB11901 DPA10103-DPB12301 DPA10103-DPB13101 DPA10103-DPB13401 DPA10103-DPB13901 DPA10103-DPB14001 DPA10103-DPB14101 DPA10103-DPB14801 DPA10103-DPB14901 DPA10103-DPB15001 DPA10103-DPB15101 DPA10103-DPB15501 DPA10103-DPB15901 DPA10103-DPB18001 DPA10104-DPB10101 DPA10104-DPB11501 DPA10105-DPB10101 DPA10105-DPB10401 DPA10105-DPB11801 DPA10105-DPB15001 DPA10106-DPB10101 DPA10201-DPB10101 DPA10201-DPB10201 DPA10201-DPB10202 DPA10201-DPB10401 DPA10201-DPB10501 DPA10201-DPB110601 DPA10201-DPB11501 DPA10201-DPB11601 DPA10201-DPB11901 DPA10201-DPB13401 DPA10201-DPB15501 DPA10202-DPB10101 DPA10202-DPB10201 DPA10202-DPB10202 DPA10202-DPB10401 DPA10202-DPB10501 DPA10202-DPB110601 DPA10202-DPB11101 DPA10202-DPB11301 DPA10202-DPB11801 DPA10202-DPB11901 DPA10202-DPB13101 DPA10202-DPB13801; note = HLAs: DPA10202-DPB15501 DPA10202-DPB16501 DPA10301-DPB10101 DPA10301-DPB10201 DPA10301-DPB10202 DPA10301-DPB10401 DPA10301-DPB10402 DPA10301-DPB110501 DPA10301-DPB110601 DPA10301-DPB11101 DPA10301-DPB11301 DPA10301-DPB11801 DPA10301-DPB12301 DPA10301-DPB13901 DPA10301-DPB14001 DPA10301-DPB14901 DPA10301-DPB15501 DPA10301-DPB16501 DPA10301-DPB17501 DPA10301-DPB18001 DPA10401-DPB10101 DPA10401-DPB10201 DPA10401-DPB10202 DPA10401-DPB10402 DPA10401-DPB10501 DPA10401-DPB110501 DPA10401-DPB14901
KEPPWLWKGFELLPDKWTVQ

SEQ ID NO: 6844 - protein, 20 aa, synthetic construct
  source 1..20: note = Seed: KEPPFLWMGYELHPDKWTVQ; note = HLAs: DRB1_0101 DPA10103-DPB10101 DPA10103-DPB10201 DPA10103-DPB10202 DPA10103-DPB10401 DPA10103-DPB10402 DPA10103-DPB10501 DPA10103-DPB110501 DPA10103-DPB112601 DPA10103-DPB11501 DPA10103-DPB11601 DPA10103-DPB11801 DPA10103-DPB11901 DPA10103-DPB12301 DPA10103-DPB13101 DPA10103-DPB13401 DPA10103-DPB13901 DPA10103-DPB14001 DPA10103-DPB14101 DPA10103-DPB14801 DPA10103-DPB14901 DPA10103-DPB15001 DPA10103-DPB15101 DPA10103-DPB15501 DPA10103-DPB15901 DPA10103-DPB18001 DPA10104-DPB10101 DPA10104-DPB11501 DPA10105-DPB10101 DPA10105-DPB10401 DPA10105-DPB11801 DPA10105-DPB15001 DPA10106-DPB10101 DPA10201-DPB10101 DPA10201-DPB10201 DPA10201-DPB10202 DPA10201-DPB10401 DPA10201-DPB10501 DPA10201-DPB110601 DPA10201-DPB11501 DPA10201-DPB11601 DPA10201-DPB11901 DPA10201-DPB13401 DPA10201-DPB15501 DPA10202-DPB10101 DPA10202-DPB10201 DPA10202-DPB10202 DPA10202-DPB10401 DPA10202-DPB10501 DPA10202-DPB110601 DPA10202-DPB11101 DPA10202-DPB11301 DPA10202-DPB11801 DPA10202-DPB11901 DPA10202-DPB13101; note = HLAs: DPA10202-DPB13801 DPA10202-DPB15501 DPA10202-DPB16501 DPA10301-DPB10101 DPA10301-DPB10201 DPA10301-DPB10202 DPA10301-DPB10401 DPA10301-DPB10402 DPA10301-DPB110501 DPA10301-DPB110601 DPA10301-DPB11101 DPA10301-DPB11301 DPA10301-DPB11801 DPA10301-DPB12301 DPA10301-DPB13901 DPA10301-DPB14001 DPA10301-DPB14901 DPA10301-DPB15501 DPA10301-DPB16501 DPA10301-DPB17501 DPA10301-DPB18001 DPA10401-DPB10101 DPA10401-DPB10201 DPA10401-DPB10202 DPA10401-DPB10402 DPA10401-DPB10501 DPA10401-DPB110501 DPA10401-DPB14901
KEPPFLWNGLELVPDKWTVQ

SEQ ID NO: 6845 - protein, 14 aa, synthetic construct
  source 1..14: note = Seed: PPFLWMGYELHPDK; note = HLAs: DRB1_1001 DPA10103-DPB10101 DPA10103-DPB10201 DPA10103-DPB10202 DPA10103-DPB10401 DPA10103-DPB112601 DPA10103-DPB11501 DPA10103-DPB11601 DPA10103-DPB11901 DPA10103-DPB12301 DPA10103-DPB13101 DPA10103-DPB13401 DPA10103-DPB13901 DPA10103-DPB14001 DPA10103-DPB14101 DPA10103-DPB14801 DPA10103-DPB15001 DPA10103-DPB15901 DPA10104-DPB10101 DPA10104-DPB11501 DPA10105-DPB10101 DPA10105-DPB10401 DPA10105-DPB15001 DPA10106-DPB10101 DPA10201-DPB10101 DPA10201-DPB110601 DPA10201-DPB11501 DPA10201-DPB11601 DPA10201-DPB11901 DPA10202-DPB10101 DPA10202-DPB10201 DPA10202-DPB10202 DPA10202-DPB10401 DPA10202-DPB110601 DPA10202-DPB11901 DPA10202-DPB13101 DPA10202-DPB16501 DPA10301-DPB10101 DPA10301-DPB10201 DPA10301-DPB10202 DPA10301-DPB10401 DPA10301-DPB10402 DPA10301-DPB110501 DPA10301-DPB110601 DPA10301-DPB11801 DPA10301-DPB12301 DPA10301-DPB13901 DPA10301-DPB14001 DPA10301-DPB14901 DPA10301-DPB15501 DPA10301-DPB16501 DPA10301-DPB17501 DPA10301-DPB18001 DPA10401-DPB10101 DPA10401-DPB10201; note = HLAs: DPA10401-DPB10202 DPA10401-DPB10402 DPA10401-DPB10501 DPA10401-DPB110501 DPA10401-DPB14901
PPFLWTGIELMPDK

SEQ ID NO: 6846 - protein, 20 aa, synthetic construct
  source 1..20: note = Seed: KEPPFLWMGYELHPDKWTVQ; note = HLAs: DPA10103-DPB10101 DPA10103-DPB10201 DPA10103-DPB10202 DPA10103-DPB10401 DPA10103-DPB10402 DPA10103-DPB10501 DPA10103-DPB110501 DPA10103-DPB112601 DPA10103-DPB11501 DPA10103-DPB11601 DPA10103-DPB11801 DPA10103-DPB11901 DPA10103-DPB12301 DPA10103-DPB13101 DPA10103-DPB13401 DPA10103-DPB13901 DPA10103-DPB14001 DPA10103-DPB14101 DPA10103-DPB14801 DPA10103-DPB14901 DPA10103-DPB15001 DPA10103-DPB15101 DPA10103-DPB15501 DPA10103-DPB15901 DPA10103-DPB18001 DPA10104-DPB10101 DPA10104-DPB11501 DPA10105-DPB10101 DPA10105-DPB10401 DPA10105-DPB11801 DPA10105-DPB15001 DPA10106-DPB10101 DPA10201-DPB10101 DPA10201-DPB10201 DPA10201-DPB10202 DPA10201-DPB10401 DPA10201-DPB10501 DPA10201-DPB110601 DPA10201-DPB11501 DPA10201-DPB11601 DPA10201-DPB11901 DPA10201-DPB13401 DPA10201-DPB15501 DPA10202-DPB10101 DPA10202-DPB10201 DPA10202-DPB10202 DPA10202-DPB10401 DPA10202-DPB10501 DPA10202-DPB110601 DPA10202-DPB11101 DPA10202-DPB11301 DPA10202-DPB11801 DPA10202-DPB11901 DPA10202-DPB13101 DPA10202-DPB13801; note = HLAs: DPA10202-DPB15501 DPA10202-DPB16501 DPA10301-DPB10101 DPA10301-DPB10201 DPA10301-DPB10202 DPA10301-DPB10401 DPA10301-DPB10402 DPA10301-DPB110501 DPA10301-DPB110601 DPA10301-DPB11101 DPA10301-DPB11301 DPA10301-DPB11801 DPA10301-DPB12301 DPA10301-DPB13901 DPA10301-DPB14001 DPA10301-DPB14901 DPA10301-DPB15501 DPA10301-DPB16501 DPA10301-DPB17501 DPA10301-DPB18001 DPA10401-DPB10101 DPA10401-DPB10201 DPA10401-DPB10202 DPA10401-DPB10402 DPA10401-DPB10501 DPA10401-DPB110501 DPA10401-DPB14901
KEPPFLWEGYELFPDKWTVQ

SEQ ID NO: 6847 - protein, 14 aa, synthetic construct
  source 1..14: note = Seed: PPFLWMGYELHPDK; note = HLAs: DPA10103-DPB10101 DPA10103-DPB10201 DPA10103-DPB10202 DPA10103-DPB10401 DPA10103-DPB112601 DPA10103-DPB11501 DPA10103-DPB11601 DPA10103-DPB11901 DPA10103-DPB12301 DPA10103-DPB13101 DPA10103-DPB13401 DPA10103-DPB13901 DPA10103-DPB14001 DPA10103-DPB14101 DPA10103-DPB14801 DPA10103-DPB15001 DPA10103-DPB15901 DPA10104-DPB10101 DPA10104-DPB11501 DPA10105-DPB10101 DPA10105-DPB10401 DPA10105-DPB15001 DPA10106-DPB10101 DPA10201-DPB10101 DPA10201-DPB110601 DPA10201-DPB11501 DPA10201-DPB11601 DPA10201-DPB11901 DPA10202-DPB10101 DPA10202-DPB10201 DPA10202-DPB10202 DPA10202-DPB10401 DPA10202-DPB110601 DPA10202-DPB11901 DPA10202-DPB13101 DPA10202-DPB16501 DPA10301-DPB10101 DPA10301-DPB10201 DPA10301-DPB10202 DPA10301-DPB10401 DPA10301-DPB10402 DPA10301-DPB110501 DPA10301-DPB110601 DPA10301-DPB11801 DPA10301-DPB12301 DPA10301-DPB13901 DPA10301-DPB14001 DPA10301-DPB14901 DPA10301-DPB16501 DPA10301-DPB17501 DPA10301-DPB18001 DPA10401-DPB10101 DPA10401-DPB10201 DPA10401-DPB10202; note = HLAs: DPA10401-DPB10402 DPA10401-DPB10501 DPA10401-DPB110501 DPA10401-DPB14901
PPLLWVGFELYPDK

SEQ ID NO: 6848 - protein, 20 aa, synthetic construct
  source 1..20: note = Seed: KEPPFLWMGYELHPDKWTVQ; note = HLAs: DRB1_0101 DPA10103-DPB10101 DPA10103-DPB10201 DPA10103-DPB10202 DPA10103-DPB10401 DPA10103-DPB10402 DPA10103-DPB10501 DPA10103-DPB110501 DPA10103-DPB112601 DPA10103-DPB11501 DPA10103-DPB11601 DPA10103-DPB11801 DPA10103-DPB11901 DPA10103-DPB12301 DPA10103-DPB13101 DPA10103-DPB13401 DPA10103-DPB13901 DPA10103-DPB14001 DPA10103-DPB14101 DPA10103-DPB14801 DPA10103-DPB14901 DPA10103-DPB15001 DPA10103-DPB15101 DPA10103-DPB15501 DPA10103-DPB15901 DPA10103-DPB18001 DPA10104-DPB10101 DPA10104-DPB11501 DPA10105-DPB10101 DPA10105-DPB10401 DPA10105-DPB11801 DPA10105-DPB15001 DPA10106-DPB10101 DPA10201-DPB10101 DPA10201-DPB10201 DPA10201-DPB10202 DPA10201-DPB10401 DPA10201-DPB10501 DPA10201-DPB110601 DPA10201-DPB11501 DPA10201-DPB11601 DPA10201-DPB11901 DPA10201-DPB13401 DPA10201-DPB15501 DPA10202-DPB10101 DPA10202-DPB10201 DPA10202-DPB10202 DPA10202-DPB10401 DPA10202-DPB10501 DPA10202-DPB110601 DPA10202-DPB11101 DPA10202-DPB11301 DPA10202-DPB11801 DPA10202-DPB11901 DPA10202-DPB13101; note = HLAs: DPA10202-DPB13801 DPA10202-DPB15501 DPA10202-DPB16501 DPA10301-DPB10101 DPA10301-DPB10201 DPA10301-DPB10202 DPA10301-DPB10401 DPA10301-DPB10402 DPA10301-DPB110501 DPA10301-DPB110601 DPA10301-DPB11101 DPA10301-DPB11301 DPA10301-DPB11801 DPA10301-DPB12301 DPA10301-DPB13901 DPA10301-DPB14001 DPA10301-DPB14901 DPA10301-DPB15501 DPA10301-DPB16501 DPA10301-DPB17501 DPA10301-DPB18001 DPA10401-DPB10101 DPA10401-DPB10201 DPA10401-DPB10202 DPA10401-DPB10402 DPA10401-DPB10501 DPA10401-DPB110501 DPA10401-DPB14901
KEPPFLWMGFELHPDKWTVQ

SEQ ID NO: 6849 - protein, 14 aa, synthetic construct
  source 1..14: note = Seed: PPFLWMGYELHPDK; note = HLAs: DRB1_1001 DPA10103-DPB10101 DPA10103-DPB10201 DPA10103-DPB10202 DPA10103-DPB10401 DPA10103-DPB112601 DPA10103-DPB11501 DPA10103-DPB11601 DPA10103-DPB11901 DPA10103-DPB12301 DPA10103-DPB13101 DPA10103-DPB13401 DPA10103-DPB13901 DPA10103-DPB14001 DPA10103-DPB14101 DPA10103-DPB14801 DPA10103-DPB15001 DPA10103-DPB15901 DPA10104-DPB10101 DPA10104-DPB11501 DPA10105-DPB10101 DPA10105-DPB10401 DPA10105-DPB15001 DPA10106-DPB10101 DPA10201-DPB10101 DPA10201-DPB110601 DPA10201-DPB11501 DPA10201-DPB11601 DPA10201-DPB11901 DPA10202-DPB10101 DPA10202-DPB10201 DPA10202-DPB10202 DPA10202-DPB10401 DPA10202-DPB110601 DPA10202-DPB11901 DPA10202-DPB13101 DPA10202-DPB16501 DPA10301-DPB10101 DPA10301-DPB10201 DPA10301-DPB10202 DPA10301-DPB10401 DPA10301-DPB10402 DPA10301-DPB110501 DPA10301-DPB110601 DPA10301-DPB11801 DPA10301-DPB12301 DPA10301-DPB13901 DPA10301-DPB14001 DPA10301-DPB14901 DPA10301-DPB15501 DPA10301-DPB16501 DPA10301-DPB17501 DPA10301-DPB18001 DPA10401-DPB10101 DPA10401-DPB10201; note = HLAs: DPA10401-DPB10202 DPA10401-DPB10402 DPA10401-DPB10501 DPA10401-DPB110501 DPA10401-DPB14901
PPYLWLGFELFPDK

SEQ ID NO: 6850 - protein, 14 aa, synthetic construct
  source 1..14: note = Seed: PPFLWMGYELHPDK; note = HLAs: DPA10103-DPB10101 DPA10103-DPB10201 DPA10103-DPB10202 DPA10103-DPB10401 DPA10103-DPB112601 DPA10103-DPB11501 DPA10103-DPB11601 DPA10103-DPB11901 DPA10103-DPB12301 DPA10103-DPB13101 DPA10103-DPB13401 DPA10103-DPB13901 DPA10103-DPB14001 DPA10103-DPB14101 DPA10103-DPB14801 DPA10103-DPB15001 DPA10103-DPB15901 DPA10104-DPB10101 DPA10104-DPB11501 DPA10105-DPB10101 DPA10105-DPB10401 DPA10105-DPB15001 DPA10106-DPB10101 DPA10201-DPB10101 DPA10201-DPB110601 DPA10201-DPB11501 DPA10201-DPB11601 DPA10201-DPB11901 DPA10202-DPB10101 DPA10202-DPB10201 DPA10202-DPB10202 DPA10202-DPB10401 DPA10202-DPB110601 DPA10202-DPB11901 DPA10202-DPB13101 DPA10202-DPB16501 DPA10301-DPB10101 DPA10301-DPB10201 DPA10301-DPB10202 DPA10301-DPB10401 DPA10301-DPB10402 DPA10301-DPB110501 DPA10301-DPB110601 DPA10301-DPB11801 DPA10301-DPB12301 DPA10301-DPB13901 DPA10301-DPB14001 DPA10301-DPB14901 DPA10301-DPB15501 DPA10301-DPB16501 DPA10301-DPB17501 DPA10301-DPB18001 DPA10401-DPB10101 DPA10401-DPB10201; note = HLAs: DPA10401-DPB10202 DPA10401-DPB10402 DPA10401-DPB10501 DPA10401-DPB110501 DPA10401-DPB14901
PPILWAGFELAPDK

SEQ ID NO: 6851 - protein, 14 aa, synthetic construct
  source 1..14: note = Seed: PPFLWMGYELHPDK; note = HLAs: DPA10103-DPB10101 DPA10103-DPB10201 DPA10103-DPB10202 DPA10103-DPB10401 DPA10103-DPB112601 DPA10103-DPB11501 DPA10103-DPB11601 DPA10103-DPB11901 DPA10103-DPB12301 DPA10103-DPB13101 DPA10103-DPB13401 DPA10103-DPB13901 DPA10103-DPB14001 DPA10103-DPB14101 DPA10103-DPB14801 DPA10103-DPB15001 DPA10103-DPB15901 DPA10104-DPB10101 DPA10104-DPB11501 DPA10105-DPB10101 DPA10105-DPB10401 DPA10105-DPB15001 DPA10106-DPB10101 DPA10201-DPB10101 DPA10201-DPB110601 DPA10201-DPB11501 DPA10201-DPB11601 DPA10201-DPB11901 DPA10202-DPB10101 DPA10202-DPB10201 DPA10202-DPB10202 DPA10202-DPB10401 DPA10202-DPB110601 DPA10202-DPB11901 DPA10202-DPB13101 DPA10202-DPB16501 DPA10301-DPB10101 DPA10301-DPB10201 DPA10301-DPB10202 DPA10301-DPB10401 DPA10301-DPB10402 DPA10301-DPB110501 DPA10301-DPB110601 DPA10301-DPB11801 DPA10301-DPB12301 DPA10301-DPB13901 DPA10301-DPB14001 DPA10301-DPB14901 DPA10301-DPB15501 DPA10301-DPB16501 DPA10301-DPB17501 DPA10301-DPB18001 DPA10401-DPB10101 DPA10401-DPB10201; note = HLAs: DPA10401-DPB10202 DPA10401-DPB10402 DPA10401-DPB10501 DPA10401-DPB110501 DPA10401-DPB14901
PPFLWPGFELIPDK

SEQ ID NO: 6852 - protein, 20 aa, synthetic construct
  source 1..20: note = Seed: KEPPFLWMGYELHPDKWTVQ; note = HLAs: DRB1_0101 DRB1_1001 DPA10103-DPB10101 DPA10103-DPB10201 DPA10103-DPB10202 DPA10103-DPB10401 DPA10103-DPB10402 DPA10103-DPB10501 DPA10103-DPB110501 DPA10103-DPB112601 DPA10103-DPB11501 DPA10103-DPB11601 DPA10103-DPB11801 DPA10103-DPB11901 DPA10103-DPB12301 DPA10103-DPB13101 DPA10103-DPB13401 DPA10103-DPB13901 DPA10103-DPB14001 DPA10103-DPB14101 DPA10103-DPB14801 DPA10103-DPB14901 DPA10103-DPB15001 DPA10103-DPB15101 DPA10103-DPB15501 DPA10103-DPB15901 DPA10103-DPB18001 DPA10104-DPB10101 DPA10104-DPB11501 DPA10105-DPB10101 DPA10105-DPB10401 DPA10105-DPB11801 DPA10105-DPB15001 DPA10106-DPB10101 DPA10201-DPB10101 DPA10201-DPB10201 DPA10201-DPB10202 DPA10201-DPB10401 DPA10201-DPB10501 DPA10201-DPB110601 DPA10201-DPB11501 DPA10201-DPB11601 DPA10201-DPB11901 DPA10201-DPB13401 DPA10201-DPB15501 DPA10202-DPB10101 DPA10202-DPB10201 DPA10202-DPB10202 DPA10202-DPB10401 DPA10202-DPB10501 DPA10202-DPB110601 DPA10202-DPB11101 DPA10202-DPB11301 DPA10202-DPB11801 DPA10202-DPB11901; note = HLAs: DPA10202-DPB13101 DPA10202-DPB13801 DPA10202-DPB15501 DPA10202-DPB16501 DPA10301-DPB10101 DPA10301-DPB10201 DPA10301-DPB10202 DPA10301-DPB10401 DPA10301-DPB10402 DPA10301-DPB110501 DPA10301-DPB110601 DPA10301-DPB11101 DPA10301-DPB11301 DPA10301-DPB11801 DPA10301-DPB12301 DPA10301-DPB13901 DPA10301-DPB14001 DPA10301-DPB14901 DPA10301-DPB15501 DPA10301-DPB16501 DPA10301-DPB17501 DPA10301-DPB18001 DPA10401-DPB10101 DPA10401-DPB10201 DPA10401-DPB10202 DPA10401-DPB10402 DPA10401-DPB10501 DPA10401-DPB110501 DPA10401-DPB14901
KEPPFLWNGIELLPDKWTVQ

SEQ ID NO: 6853 - protein, 14 aa, synthetic construct
  source 1..14: note = Seed: PPFLWMGYELHPDK; note = HLAs: DPA10103-DPB10101 DPA10103-DPB10201 DPA10103-DPB10202 DPA10103-DPB10401 DPA10103-DPB112601 DPA10103-DPB11501 DPA10103-DPB11601 DPA10103-DPB11901 DPA10103-DPB12301 DPA10103-DPB13101 DPA10103-DPB13401 DPA10103-DPB13901 DPA10103-DPB14001 DPA10103-DPB14101 DPA10103-DPB14801 DPA10103-DPB15001 DPA10103-DPB15901 DPA10104-DPB10101 DPA10104-DPB11501 DPA10105-DPB10101 DPA10105-DPB10401 DPA10105-DPB15001 DPA10106-DPB10101 DPA10201-DPB10101 DPA10201-DPB110601 DPA10201-DPB11501 DPA10201-DPB11601 DPA10201-DPB11901 DPA10202-DPB10101 DPA10202-DPB10201 DPA10202-DPB10202 DPA10202-DPB10401 DPA10202-DPB110601 DPA10202-DPB11901 DPA10202-DPB13101 DPA10202-DPB16501 DPA10301-DPB10101 DPA10301-DPB10201 DPA10301-DPB10202 DPA10301-DPB10401 DPA10301-DPB10402 DPA10301-DPB110501 DPA10301-DPB110601 DPA10301-DPB11801 DPA10301-DPB12301 DPA10301-DPB13901 DPA10301-DPB14001 DPA10301-DPB14901 DPA10301-DPB15501 DPA10301-DPB16501 DPA10301-DPB17501 DPA10301-DPB18001 DPA10401-DPB10101 DPA10401-DPB10201; note = HLAs: DPA10401-DPB10202 DPA10401-DPB10402 DPA10401-DPB10501 DPA10401-DPB110501 DPA10401-DPB14901
PPFLWYGFELYPDK

SEQ ID NO: 6854 - protein, 14 aa, synthetic construct
  source 1..14: note = Seed: PPFLWMGYELHPDK; note = HLAs: DPA10103-DPB10101 DPA10103-DPB10201 DPA10103-DPB10202 DPA10103-DPB10401 DPA10103-DPB112601 DPA10103-DPB11501 DPA10103-DPB11601 DPA10103-DPB11901 DPA10103-DPB12301 DPA10103-DPB13101 DPA10103-DPB13401 DPA10103-DPB13901 DPA10103-DPB14001 DPA10103-DPB14101 DPA10103-DPB14801 DPA10103-DPB15001 DPA10103-DPB15901 DPA10104-DPB10101 DPA10104-DPB11501 DPA10105-DPB10101 DPA10105-DPB10401 DPA10105-DPB15001 DPA10106-DPB10101 DPA10201-DPB10101 DPA10201-DPB110601 DPA10201-DPB11501 DPA10201-DPB11601 DPA10201-DPB11901 DPA10202-DPB10101 DPA10202-DPB10201 DPA10202-DPB10202 DPA10202-DPB10401 DPA10202-DPB110601 DPA10202-DPB11901 DPA10202-DPB13101 DPA10202-DPB16501 DPA10301-DPB10101 DPA10301-DPB10201 DPA10301-DPB10202 DPA10301-DPB10401 DPA10301-DPB10402 DPA10301-DPB110501 DPA10301-DPB110601 DPA10301-DPB11801 DPA10301-DPB12301 DPA10301-DPB13901 DPA10301-DPB14001 DPA10301-DPB14901 DPA10301-DPB15501 DPA10301-DPB16501 DPA10301-DPB17501 DPA10301-DPB18001 DPA10401-DPB10101 DPA10401-DPB10201; note = HLAs: DPA10401-DPB10202 DPA10401-DPB10402 DPA10401-DPB10501 DPA10401-DPB110501 DPA10401-DPB14901
PPFLWIGWELFPDK

SEQ ID NO: 6855 - protein, 14 aa, synthetic construct
  source 1..14: note = Seed: PPFLWMGYELHPDK; note = HLAs: DPA10103-DPB10101 DPA10103-DPB10201 DPA10103-DPB10202 DPA10103-DPB10401 DPA10103-DPB112601 DPA10103-DPB11501 DPA10103-DPB11601 DPA10103-DPB11901 DPA10103-DPB12301 DPA10103-DPB13101 DPA10103-DPB13401 DPA10103-DPB13901 DPA10103-DPB14001 DPA10103-DPB14101 DPA10103-DPB14801 DPA10103-DPB15001 DPA10103-DPB15901 DPA10104-DPB10101 DPA10104-DPB11501 DPA10105-DPB10101 DPA10105-DPB10401 DPA10105-DPB15001 DPA10106-DPB10101 DPA10201-DPB10101 DPA10201-DPB110601 DPA10201-DPB11501 DPA10201-DPB11601 DPA10201-DPB11901 DPA10202-DPB10101 DPA10202-DPB10201 DPA10202-DPB10202 DPA10202-DPB10401 DPA10202-DPB110601 DPA10202-DPB11901 DPA10202-DPB13101 DPA10202-DPB16501 DPA10301-DPB10101 DPA10301-DPB10201 DPA10301-DPB10202 DPA10301-DPB10401 DPA10301-DPB10402 DPA10301-DPB110501 DPA10301-DPB110601 DPA10301-DPB11801 DPA10301-DPB12301 DPA10301-DPB13901 DPA10301-DPB14001 DPA10301-DPB14901 DPA10301-DPB15501 DPA10301-DPB16501 DPA10301-DPB17501 DPA10301-DPB18001 DPA10401-DPB10101 DPA10401-DPB10201; note = HLAs: DPA10401-DPB10202 DPA10401-DPB10402 DPA10401-DPB10501 DPA10401-DPB110501 DPA10401-DPB14901
PPYLWFGFELFPDK

SEQ ID NO: 6856 - protein, 14 aa, synthetic construct
  source 1..14: note = Seed: PPFLWMGYELHPDK; note = HLAs: DRB1_1001 DPA10103-DPB10201 DPA10103-DPB10202 DPA10103-DPB10401 DPA10103-DPB112601 DPA10103-DPB11501 DPA10103-DPB11601 DPA10103-DPB11901 DPA10103-DPB12301 DPA10103-DPB13401 DPA10103-DPB13901 DPA10103-DPB14001 DPA10103-DPB14101 DPA10103-DPB14801 DPA10103-DPB15901 DPA10104-DPB11501 DPA10105-DPB10401 DPA10106-DPB10101 DPA10201-DPB10101 DPA10201-DPB110601 DPA10201-DPB11501 DPA10201-DPB11601 DPA10201-DPB11901 DPA10202-DPB10101 DPA10202-DPB10201 DPA10202-DPB10202 DPA10202-DPB10401 DPA10202-DPB110601 DPA10202-DPB11901 DPA10202-DPB13101 DPA10202-DPB16501 DPA10301-DPB10201 DPA10301-DPB10202 DPA10301-DPB10401 DPA10301-DPB10402 DPA10301-DPB110501 DPA10301-DPB110601 DPA10301-DPB11801 DPA10301-DPB12301 DPA10301-DPB13901 DPA10301-DPB14001 DPA10301-DPB14901 DPA10301-DPB15501 DPA10301-DPB17501 DPA10301-DPB18001 DPA10401-DPB10201 DPA10401-DPB10202 DPA10401-DPB10402 DPA10401-DPB110501 DPA10401-DPB14901
PPFLWFGAELLPDK

SEQ ID NO: 6857 - protein, 20 aa, synthetic construct
  source 1..20: note = Seed: KEPPFLWMGYELHPDKWTVQ; note = HLAs: DRB1_0101 DRB1_1001 DPA10103-DPB10101 DPA10103-DPB10201 DPA10103-DPB10202 DPA10103-DPB10401 DPA10103-DPB10402 DPA10103-DPB10501 DPA10103-DPB110501 DPA10103-DPB112601 DPA10103-DPB11501 DPA10103-DPB11601 DPA10103-DPB11801 DPA10103-DPB11901 DPA10103-DPB12301 DPA10103-DPB13101 DPA10103-DPB13401 DPA10103-DPB13901 DPA10103-DPB14001 DPA10103-DPB14101 DPA10103-DPB14801 DPA10103-DPB14901 DPA10103-DPB15001 DPA10103-DPB15101 DPA10103-DPB15501 DPA10103-DPB15901 DPA10103-DPB18001 DPA10104-DPB10101 DPA10104-DPB11501 DPA10105-DPB10101 DPA10105-DPB10401 DPA10105-DPB11801 DPA10105-DPB15001 DPA10106-DPB10101 DPA10201-DPB10101 DPA10201-DPB10201 DPA10201-DPB10202 DPA10201-DPB10401 DPA10201-DPB10501 DPA10201-DPB110601 DPA10201-DPB11501 DPA10201-DPB11601 DPA10201-DPB11901 DPA10201-DPB13401 DPA10201-DPB15501 DPA10202-DPB10101 DPA10202-DPB10201 DPA10202-DPB10202 DPA10202-DPB10401 DPA10202-DPB10501 DPA10202-DPB110601 DPA10202-DPB11101 DPA10202-DPB11301 DPA10202-DPB11801 DPA10202-DPB11901; note = HLAs: DPA10202-DPB13101 DPA10202-DPB13801 DPA10202-DPB15501 DPA10202-DPB16501 DPA10301-DPB10101 DPA10301-DPB10201 DPA10301-DPB10202 DPA10301-DPB10401 DPA10301-DPB10402 DPA10301-DPB110501 DPA10301-DPB110601 DPA10301-DPB11101 DPA10301-DPB11301 DPA10301-DPB11801 DPA10301-DPB12301 DPA10301-DPB13901 DPA10301-DPB14001 DPA10301-DPB14901 DPA10301-DPB15501 DPA10301-DPB16501 DPA10301-DPB17501 DPA10301-DPB18001 DPA10401-DPB10101 DPA10401-DPB10201 DPA10401-DPB10202 DPA10401-DPB10402 DPA10401-DPB10501 DPA10401-DPB110501 DPA10401-DPB14901
KEPPYLWLGFELIPDKWTVQ

SEQ ID NO: 6858 - protein, 14 aa, synthetic construct
  source 1..14: note = Seed: PPFLWMGYELHPDK; note = HLAs: DPA10103-DPB10101 DPA10103-DPB10201 DPA10103-DPB10202 DPA10103-DPB10401 DPA10103-DPB112601 DPA10103-DPB11501 DPA10103-DPB11601 DPA10103-DPB11901 DPA10103-DPB12301 DPA10103-DPB13101 DPA10103-DPB13401 DPA10103-DPB13901 DPA10103-DPB14001 DPA10103-DPB14101 DPA10103-DPB14801 DPA10103-DPB15001 DPA10103-DPB15901 DPA10104-DPB10101 DPA10104-DPB11501 DPA10105-DPB10101 DPA10105-DPB10401 DPA10105-DPB15001 DPA10106-DPB10101 DPA10201-DPB10101 DPA10201-DPB110601 DPA10201-DPB11501 DPA10201-DPB11601 DPA10201-DPB11901 DPA10202-DPB10101 DPA10202-DPB10201 DPA10202-DPB10202 DPA10202-DPB10401 DPA10202-DPB110601 DPA10202-DPB11901 DPA10202-DPB13101 DPA10202-DPB16501 DPA10301-DPB10101 DPA10301-DPB10201 DPA10301-DPB10202 DPA10301-DPB10401 DPA10301-DPB10402 DPA10301-DPB110501 DPA10301-DPB110601 DPA10301-DPB11801 DPA10301-DPB12301 DPA10301-DPB13901 DPA10301-DPB14001 DPA10301-DPB14901 DPA10301-DPB16501 DPA10301-DPB17501 DPA10301-DPB18001 DPA10401-DPB10101 DPA10401-DPB10201 DPA10401-DPB10202; note = HLAs: DPA10401-DPB10402 DPA10401-DPB10501 DPA10401-DPB110501 DPA10401-DPB14901
PPWLWFGFELLPDK

SEQ ID NO: 6859 - protein, 14 aa, synthetic construct
  source 1..14: note = Seed: PPFLWMGYELHPDK; note = HLAs: DPA10103-DPB10101 DPA10103-DPB10201 DPA10103-DPB10202 DPA10103-DPB10401 DPA10103-DPB112601 DPA10103-DPB11501 DPA10103-DPB11601 DPA10103-DPB11901 DPA10103-DPB12301 DPA10103-DPB13101 DPA10103-DPB13401 DPA10103-DPB13901 DPA10103-DPB14001 DPA10103-DPB14101 DPA10103-DPB14801 DPA10103-DPB15001 DPA10103-DPB15901 DPA10104-DPB10101 DPA10104-DPB11501 DPA10105-DPB10101 DPA10105-DPB10401 DPA10105-DPB15001 DPA10106-DPB10101 DPA10201-DPB10101 DPA10201-DPB110601 DPA10201-DPB11501 DPA10201-DPB11601 DPA10201-DPB11901 DPA10202-DPB10101 DPA10202-DPB10201 DPA10202-DPB10202 DPA10202-DPB10401 DPA10202-DPB110601 DPA10202-DPB11901 DPA10202-DPB13101 DPA10202-DPB16501 DPA10301-DPB10101 DPA10301-DPB10201 DPA10301-DPB10202 DPA10301-DPB10401 DPA10301-DPB10402 DPA10301-DPB110501 DPA10301-DPB110601 DPA10301-DPB11801 DPA10301-DPB12301 DPA10301-DPB13901 DPA10301-DPB14001 DPA10301-DPB14901 DPA10301-DPB15501 DPA10301-DPB16501 DPA10301-DPB17501 DPA10301-DPB18001 DPA10401-DPB10101 DPA10401-DPB10201; note = HLAs: DPA10401-DPB10202 DPA10401-DPB10402 DPA10401-DPB10501 DPA10401-DPB110501 DPA10401-DPB14901
PPFLWHGFELHPDK

SEQ ID NO: 6860 - protein, 14 aa, synthetic construct
  source 1..14: note = Seed: PPFLWMGYELHPDK; note = HLAs: DPA10103-DPB10101 DPA10103-DPB10201 DPA10103-DPB10202 DPA10103-DPB10401 DPA10103-DPB112601 DPA10103-DPB11501 DPA10103-DPB11601 DPA10103-DPB11901 DPA10103-DPB12301 DPA10103-DPB13101 DPA10103-DPB13401 DPA10103-DPB13901 DPA10103-DPB14001 DPA10103-DPB14101 DPA10103-DPB14801 DPA10103-DPB15001 DPA10103-DPB15901 DPA10104-DPB10101 DPA10104-DPB11501 DPA10105-DPB10101 DPA10105-DPB10401 DPA10105-DPB15001 DPA10106-DPB10101 DPA10201-DPB10101 DPA10201-DPB110601 DPA10201-DPB11501 DPA10201-DPB11601 DPA10201-DPB11901 DPA10202-DPB10101 DPA10202-DPB10201 DPA10202-DPB10202 DPA10202-DPB10401 DPA10202-DPB110601 DPA10202-DPB11901 DPA10202-DPB13101 DPA10202-DPB16501 DPA10301-DPB10101 DPA10301-DPB10201 DPA10301-DPB10202 DPA10301-DPB10401 DPA10301-DPB10402 DPA10301-DPB110501 DPA10301-DPB110601 DPA10301-DPB11801 DPA10301-DPB12301 DPA10301-DPB13901 DPA10301-DPB14001 DPA10301-DPB14901 DPA10301-DPB15501 DPA10301-DPB16501 DPA10301-DPB17501 DPA10301-DPB18001 DPA10401-DPB10101 DPA10401-DPB10201; note = HLAs: DPA10401-DPB10202 DPA10401-DPB10402 DPA10401-DPB10501 DPA10401-DPB110501 DPA10401-DPB14901
PPFLWAGFELRPDK

SEQ ID NO: 6861 - protein, 14 aa, synthetic construct
  source 1..14: note = Seed: PPFLWMGYELHPDK; note = HLAs: DPA10103-DPB10201 DPA10103-DPB10202 DPA10103-DPB10401 DPA10103-DPB112601 DPA10103-DPB11501 DPA10103-DPB11601 DPA10103-DPB11901 DPA10103-DPB12301 DPA10103-DPB13401 DPA10103-DPB13901 DPA10103-DPB14001 DPA10103-DPB14101 DPA10103-DPB14801 DPA10103-DPB15901 DPA10104-DPB11501 DPA10105-DPB10401 DPA10201-DPB110601 DPA10201-DPB11501 DPA10201-DPB11601 DPA10201-DPB11901 DPA10202-DPB10101 DPA10202-DPB10201 DPA10202-DPB10202 DPA10202-DPB10401 DPA10202-DPB110601 DPA10202-DPB11901 DPA10202-DPB13101 DPA10202-DPB16501 DPA10301-DPB10201 DPA10301-DPB10202 DPA10301-DPB10401 DPA10301-DPB10402 DPA10301-DPB110501 DPA10301-DPB110601 DPA10301-DPB11801 DPA10301-DPB12301 DPA10301-DPB13901 DPA10301-DPB14001 DPA10301-DPB14901 DPA10301-DPB15501 DPA10301-DPB17501 DPA10301-DPB18001 DPA10401-DPB10201 DPA10401-DPB10202 DPA10401-DPB10402 DPA10401-DPB10501 DPA10401-DPB110501 DPA10401-DPB14901
PPFLWWGLELLPDK

SEQ ID NO: 6862 - protein, 14 aa, synthetic construct
  source 1..14: note = Seed: PPFLWMGYELHPDK; note = HLAs: DRB1_1001 DPA10103-DPB10101 DPA10103-DPB10201 DPA10103-DPB10202 DPA10103-DPB10401 DPA10103-DPB112601 DPA10103-DPB11501 DPA10103-DPB11601 DPA10103-DPB11901 DPA10103-DPB12301 DPA10103-DPB13101 DPA10103-DPB13401 DPA10103-DPB13901 DPA10103-DPB14001 DPA10103-DPB14101 DPA10103-DPB14801 DPA10103-DPB15001 DPA10103-DPB15901 DPA10104-DPB10101 DPA10104-DPB11501 DPA10105-DPB10101 DPA10105-DPB10401 DPA10105-DPB15001 DPA10106-DPB10101 DPA10201-DPB10101 DPA10201-DPB110601 DPA10201-DPB11501 DPA10201-DPB11601 DPA10201-DPB11901 DPA10202-DPB10101 DPA10202-DPB10201 DPA10202-DPB10202 DPA10202-DPB10401 DPA10202-DPB110601 DPA10202-DPB11901 DPA10202-DPB13101 DPA10202-DPB16501 DPA10301-DPB10101 DPA10301-DPB10201 DPA10301-DPB10202 DPA10301-DPB10401 DPA10301-DPB10402 DPA10301-DPB110501 DPA10301-DPB110601 DPA10301-DPB11801 DPA10301-DPB12301 DPA10301-DPB13901 DPA10301-DPB14001 DPA10301-DPB14901 DPA10301-DPB15501 DPA10301-DPB16501 DPA10301-DPB17501 DPA10301-DPB18001 DPA10401-DPB10101 DPA10401-DPB10201; note = HLAs: DPA10401-DPB10202 DPA10401-DPB10402 DPA10401-DPB10501 DPA10401-DPB110501 DPA10401-DPB14901
PPFLWLGWELIPDK

SEQ ID NO: 6863 - protein, 14 aa, synthetic construct
  source 1..14: note = Seed: PPFLWMGYELHPDK; note = HLAs: DPA10103-DPB10101 DPA10103-DPB10201 DPA10103-DPB10202 DPA10103-DPB10401 DPA10103-DPB112601 DPA10103-DPB11501 DPA10103-DPB11601 DPA10103-DPB11901 DPA10103-DPB12301 DPA10103-DPB13101 DPA10103-DPB13401 DPA10103-DPB13901 DPA10103-DPB14001 DPA10103-DPB14101 DPA10103-DPB14801 DPA10103-DPB15001 DPA10103-DPB15901 DPA10104-DPB10101 DPA10104-DPB11501 DPA10105-DPB10101 DPA10105-DPB10401 DPA10105-DPB15001 DPA10106-DPB10101 DPA10201-DPB10101 DPA10201-DPB110601 DPA10201-DPB11501 DPA10201-DPB11601 DPA10201-DPB11901 DPA10202-DPB10101 DPA10202-DPB10201 DPA10202-DPB10202 DPA10202-DPB10401 DPA10202-DPB110601 DPA10202-DPB11901 DPA10202-DPB13101 DPA10202-DPB16501 DPA10301-DPB10101 DPA10301-DPB10201 DPA10301-DPB10202 DPA10301-DPB10401 DPA10301-DPB10402 DPA10301-DPB110501 DPA10301-DPB110601 DPA10301-DPB11801 DPA10301-DPB12301 DPA10301-DPB13901 DPA10301-DPB14001 DPA10301-DPB14901 DPA10301-DPB16501 DPA10301-DPB17501 DPA10301-DPB18001 DPA10401-DPB10101 DPA10401-DPB10201 DPA10401-DPB10202; note = HLAs: DPA10401-DPB10402 DPA10401-DPB10501 DPA10401-DPB110501 DPA10401-DPB14901
PPFLWFGFELRPDK

SEQ ID NO: 6864 - protein, 20 aa, synthetic construct
  source 1..20: note = Seed: KEPPFLWMGYELHPDKWTVQ; note = HLAs: DRB1_0101 DPA10103-DPB10101 DPA10103-DPB10201 DPA10103-DPB10202 DPA10103-DPB10401 DPA10103-DPB10402 DPA10103-DPB10501 DPA10103-DPB110501 DPA10103-DPB112601 DPA10103-DPB11501 DPA10103-DPB11601 DPA10103-DPB11801 DPA10103-DPB11901 DPA10103-DPB12301 DPA10103-DPB13101 DPA10103-DPB13401 DPA10103-DPB13901 DPA10103-DPB14001 DPA10103-DPB14101 DPA10103-DPB14801 DPA10103-DPB14901 DPA10103-DPB15001 DPA10103-DPB15101 DPA10103-DPB15501 DPA10103-DPB15901 DPA10103-DPB18001 DPA10104-DPB10101 DPA10104-DPB11501 DPA10105-DPB10101 DPA10105-DPB10401 DPA10105-DPB11801 DPA10105-DPB15001 DPA10106-DPB10101 DPA10201-DPB10101 DPA10201-DPB10201 DPA10201-DPB10202 DPA10201-DPB10401 DPA10201-DPB10501 DPA10201-DPB110601 DPA10201-DPB11501 DPA10201-DPB11601 DPA10201-DPB11901 DPA10201-DPB13401 DPA10201-DPB15501 DPA10202-DPB10101 DPA10202-DPB10201 DPA10202-DPB10202 DPA10202-DPB10401 DPA10202-DPB10501 DPA10202-DPB110601 DPA10202-DPB11101 DPA10202-DPB11301 DPA10202-DPB11801 DPA10202-DPB11901 DPA10202-DPB13101; note = HLAs: DPA10202-DPB13801 DPA10202-DPB15501 DPA10202-DPB16501 DPA10301-DPB10101 DPA10301-DPB10201 DPA10301-DPB10202 DPA10301-DPB10401 DPA10301-DPB10402 DPA10301-DPB110501 DPA10301-DPB110601 DPA10301-DPB11101 DPA10301-DPB11301 DPA10301-DPB11801 DPA10301-DPB12301 DPA10301-DPB13901 DPA10301-DPB14001 DPA10301-DPB14901 DPA10301-DPB15501 DPA10301-DPB16501 DPA10301-DPB17501 DPA10301-DPB18001 DPA10401-DPB10101 DPA10401-DPB10201 DPA10401-DPB10202 DPA10401-DPB10402 DPA10401-DPB10501 DPA10401-DPB110501 DPA10401-DPB14901
KEPPFLWHGMELVPDKWTVQ

SEQ ID NO: 6865 - protein, 14 aa, synthetic construct
  source 1..14: note = Seed: PPFLWMGYELHPDK; note = HLAs: DRB1_1001 DPA10103-DPB10201 DPA10103-DPB10202 DPA10103-DPB10401 DPA10103-DPB112601 DPA10103-DPB11501 DPA10103-DPB11601 DPA10103-DPB11901 DPA10103-DPB12301 DPA10103-DPB13401 DPA10103-DPB13901 DPA10103-DPB14001 DPA10103-DPB14101 DPA10103-DPB14801 DPA10103-DPB15901 DPA10104-DPB11501 DPA10105-DPB10401 DPA10106-DPB10101 DPA10201-DPB10101 DPA10201-DPB110601 DPA10201-DPB11501 DPA10201-DPB11601 DPA10201-DPB11901 DPA10202-DPB10101 DPA10202-DPB10201 DPA10202-DPB10202 DPA10202-DPB10401 DPA10202-DPB110601 DPA10202-DPB11901 DPA10202-DPB13101 DPA10202-DPB16501 DPA10301-DPB10101 DPA10301-DPB10201 DPA10301-DPB10202 DPA10301-DPB10401 DPA10301-DPB10402 DPA10301-DPB110501 DPA10301-DPB110601 DPA10301-DPB11801 DPA10301-DPB12301 DPA10301-DPB13901 DPA10301-DPB14001 DPA10301-DPB14901 DPA10301-DPB15501 DPA10301-DPB16501 DPA10301-DPB17501 DPA10301-DPB18001 DPA10401-DPB10201 DPA10401-DPB10202 DPA10401-DPB10402 DPA10401-DPB10501 DPA10401-DPB110501 DPA10401-DPB14901
PPFLWIGAELLPDK

SEQ ID NO: 6866 - protein, 20 aa, synthetic construct
  source 1..20: note = Seed: KEPPFLWMGYELHPDKWTVQ; note = HLAs: DPA10103-DPB10101 DPA10103-DPB10201 DPA10103-DPB10202 DPA10103-DPB10401 DPA10103-DPB10402 DPA10103-DPB10501 DPA10103-DPB110501 DPA10103-DPB112601 DPA10103-DPB11501 DPA10103-DPB11601 DPA10103-DPB11801 DPA10103-DPB11901 DPA10103-DPB12301 DPA10103-DPB13101 DPA10103-DPB13401 DPA10103-DPB13901 DPA10103-DPB14001 DPA10103-DPB14101 DPA10103-DPB14801 DPA10103-DPB14901 DPA10103-DPB15001 DPA10103-DPB15101 DPA10103-DPB15501 DPA10103-DPB15901 DPA10103-DPB18001 DPA10104-DPB10101 DPA10104-DPB11501 DPA10105-DPB10101 DPA10105-DPB10401 DPA10105-DPB11801 DPA10105-DPB15001 DPA10106-DPB10101 DPA10201-DPB10101 DPA10201-DPB10201 DPA10201-DPB10202 DPA10201-DPB10401 DPA10201-DPB10501 DPA10201-DPB110601 DPA10201-DPB11501 DPA10201-DPB11601 DPA10201-DPB11901 DPA10201-DPB13401 DPA10201-DPB15501 DPA10202-DPB10101 DPA10202-DPB10201 DPA10202-DPB10202 DPA10202-DPB10401 DPA10202-DPB10501 DPA10202-DPB110601 DPA10202-DPB11101 DPA10202-DPB11301 DPA10202-DPB11801 DPA10202-DPB11901 DPA10202-DPB13101 DPA10202-DPB13801; note = HLAs: DPA10202-DPB15501 DPA10202-DPB16501 DPA10301-DPB10101 DPA10301-DPB10201 DPA10301-DPB10202 DPA10301-DPB10401 DPA10301-DPB10402 DPA10301-DPB110501 DPA10301-DPB110601 DPA10301-DPB11101 DPA10301-DPB11301 DPA10301-DPB11801 DPA10301-DPB12301 DPA10301-DPB13901 DPA10301-DPB14001 DPA10301-DPB14901 DPA10301-DPB15501 DPA10301-DPB16501 DPA10301-DPB17501 DPA10301-DPB18001 DPA10401-DPB10101 DPA10401-DPB10201 DPA10401-DPB10202 DPA10401-DPB10402 DPA10401-DPB10501 DPA10401-DPB110501 DPA10401-DPB14901
KEPPVLWSGFELMPDKWTVQ

SEQ ID NO: 6867 - protein, 14 aa, synthetic construct
  source 1..14: note = Seed: PPFLWMGYELHPDK; note = HLAs: DPA10103-DPB10101 DPA10103-DPB10201 DPA10103-DPB10202 DPA10103-DPB10401 DPA10103-DPB112601 DPA10103-DPB11501 DPA10103-DPB11601 DPA10103-DPB11901 DPA10103-DPB12301 DPA10103-DPB13101 DPA10103-DPB13401 DPA10103-DPB13901 DPA10103-DPB14001 DPA10103-DPB14101 DPA10103-DPB14801 DPA10103-DPB15001 DPA10103-DPB15901 DPA10104-DPB10101 DPA10104-DPB11501 DPA10105-DPB10101 DPA10105-DPB10401 DPA10105-DPB15001 DPA10106-DPB10101 DPA10201-DPB10101 DPA10201-DPB110601 DPA10201-DPB11501 DPA10201-DPB11601 DPA10201-DPB11901 DPA10202-DPB10101 DPA10202-DPB10201 DPA10202-DPB10202 DPA10202-DPB10401 DPA10202-DPB110601 DPA10202-DPB11901 DPA10202-DPB13101 DPA10202-DPB16501 DPA10301-DPB10101 DPA10301-DPB10201 DPA10301-DPB10202 DPA10301-DPB10401 DPA10301-DPB10402 DPA10301-DPB110501 DPA10301-DPB110601 DPA10301-DPB11801 DPA10301-DPB12301 DPA10301-DPB13901 DPA10301-DPB14001 DPA10301-DPB14901 DPA10301-DPB15501 DPA10301-DPB16501 DPA10301-DPB17501 DPA10301-DPB18001 DPA10401-DPB10101 DPA10401-DPB10201; note = HLAs: DPA10401-DPB10202 DPA10401-DPB10402 DPA10401-DPB10501 DPA10401-DPB110501 DPA10401-DPB14901
PPFLWVGWELFPDK

SEQ ID NO: 6868 - protein, 20 aa, synthetic construct
  source 1..20: note = Seed: KEPPFLWMGYELHPDKWTVQ; note = HLAs: DRB1_0101 DPA10103-DPB10101 DPA10103-DPB10201 DPA10103-DPB10202 DPA10103-DPB10401 DPA10103-DPB10402 DPA10103-DPB10501 DPA10103-DPB110501 DPA10103-DPB112601 DPA10103-DPB11501 DPA10103-DPB11601 DPA10103-DPB11801 DPA10103-DPB11901 DPA10103-DPB12301 DPA10103-DPB13101 DPA10103-DPB13401 DPA10103-DPB13901 DPA10103-DPB14001 DPA10103-DPB14101 DPA10103-DPB14801 DPA10103-DPB14901 DPA10103-DPB15001 DPA10103-DPB15101 DPA10103-DPB15501 DPA10103-DPB15901 DPA10103-DPB18001 DPA10104-DPB10101 DPA10104-DPB11501 DPA10105-DPB10101 DPA10105-DPB10401 DPA10105-DPB11801 DPA10105-DPB15001 DPA10106-DPB10101 DPA10201-DPB10101 DPA10201-DPB10201 DPA10201-DPB10202 DPA10201-DPB10401 DPA10201-DPB10501 DPA10201-DPB110601 DPA10201-DPB11501 DPA10201-DPB11601 DPA10201-DPB11901 DPA10201-DPB13401 DPA10201-DPB15501 DPA10202-DPB10101 DPA10202-DPB10201 DPA10202-DPB10202 DPA10202-DPB10401 DPA10202-DPB10501 DPA10202-DPB110601 DPA10202-DPB11101 DPA10202-DPB11301 DPA10202-DPB11801 DPA10202-DPB11901 DPA10202-DPB13101; note = HLAs: DPA10202-DPB13801 DPA10202-DPB15501 DPA10202-DPB16501 DPA10301-DPB10101 DPA10301-DPB10201 DPA10301-DPB10202 DPA10301-DPB10401 DPA10301-DPB10402 DPA10301-DPB110501 DPA10301-DPB110601 DPA10301-DPB11101 DPA10301-DPB11301 DPA10301-DPB11801 DPA10301-DPB12301 DPA10301-DPB13901 DPA10301-DPB14001 DPA10301-DPB14901 DPA10301-DPB15501 DPA10301-DPB16501 DPA10301-DPB17501 DPA10301-DPB18001 DPA10401-DPB10101 DPA10401-DPB10201 DPA10401-DPB10202 DPA10401-DPB10402 DPA10401-DPB10501 DPA10401-DPB110501 DPA10401-DPB14901
KEPPFLWHGIELFPDKWTVQ

SEQ ID NO: 6869 - protein, 20 aa, synthetic construct
  source 1..20: note = Seed: KEPPFLWMGYELHPDKWTVQ; note = HLAs: DPA10103-DPB10101 DPA10103-DPB10201 DPA10103-DPB10202 DPA10103-DPB10401 DPA10103-DPB10402 DPA10103-DPB10501 DPA10103-DPB110501 DPA10103-DPB112601 DPA10103-DPB11501 DPA10103-DPB11601 DPA10103-DPB11801 DPA10103-DPB11901 DPA10103-DPB12301 DPA10103-DPB13101 DPA10103-DPB13401 DPA10103-DPB13901 DPA10103-DPB14001 DPA10103-DPB14101 DPA10103-DPB14801 DPA10103-DPB14901 DPA10103-DPB15001 DPA10103-DPB15101 DPA10103-DPB15501 DPA10103-DPB15901 DPA10103-DPB18001 DPA10104-DPB10101 DPA10104-DPB11501 DPA10105-DPB10101 DPA10105-DPB10401 DPA10105-DPB11801 DPA10105-DPB15001 DPA10106-DPB10101 DPA10201-DPB10101 DPA10201-DPB10201 DPA10201-DPB10202 DPA10201-DPB10401 DPA10201-DPB10501 DPA10201-DPB110601 DPA10201-DPB11501 DPA10201-DPB11601 DPA10201-DPB11901 DPA10201-DPB13401 DPA10201-DPB15501 DPA10202-DPB10101 DPA10202-DPB10201 DPA10202-DPB10202 DPA10202-DPB10401 DPA10202-DPB10501 DPA10202-DPB110601 DPA10202-DPB11101 DPA10202-DPB11301 DPA10202-DPB11801 DPA10202-DPB11901 DPA10202-DPB13101 DPA10202-DPB13801; note = HLAs: DPA10202-DPB15501 DPA10202-DPB16501 DPA10301-DPB10101 DPA10301-DPB10201 DPA10301-DPB10202 DPA10301-DPB10401 DPA10301-DPB10402 DPA10301-DPB110501 DPA10301-DPB110601 DPA10301-DPB11101 DPA10301-DPB11301 DPA10301-DPB11801 DPA10301-DPB12301 DPA10301-DPB13901 DPA10301-DPB14001 DPA10301-DPB14901 DPA10301-DPB15501 DPA10301-DPB16501 DPA10301-DPB17501 DPA10301-DPB18001 DPA10401-DPB10101 DPA10401-DPB10201 DPA10401-DPB10202 DPA10401-DPB10402 DPA10401-DPB10501 DPA10401-DPB110501 DPA10401-DPB14901
KEPPLLWEGFELFPDKWTVQ

SEQ ID NO: 6870 - protein, 14 aa, synthetic construct
  source 1..14: note = Seed: PPFLWMGYELHPDK; note = HLAs: DRB1_1001 DPA10103-DPB10201 DPA10103-DPB10202 DPA10103-DPB10401 DPA10103-DPB112601 DPA10103-DPB11501 DPA10103-DPB11601 DPA10103-DPB11901 DPA10103-DPB12301 DPA10103-DPB13101 DPA10103-DPB13401 DPA10103-DPB13901 DPA10103-DPB14001 DPA10103-DPB14101 DPA10103-DPB14801 DPA10103-DPB15001 DPA10103-DPB15901 DPA10104-DPB11501 DPA10105-DPB10401 DPA10105-DPB15001 DPA10106-DPB10101 DPA10201-DPB10101 DPA10201-DPB110601 DPA10201-DPB11501 DPA10201-DPB11601 DPA10201-DPB11901 DPA10202-DPB10101 DPA10202-DPB10201 DPA10202-DPB10202 DPA10202-DPB10401 DPA10202-DPB110601 DPA10202-DPB11901 DPA10202-DPB13101 DPA10202-DPB16501 DPA10301-DPB10101 DPA10301-DPB10201 DPA10301-DPB10202 DPA10301-DPB10401 DPA10301-DPB10402 DPA10301-DPB110501 DPA10301-DPB110601 DPA10301-DPB11801 DPA10301-DPB12301 DPA10301-DPB13901 DPA10301-DPB14001 DPA10301-DPB14901 DPA10301-DPB15501 DPA10301-DPB16501 DPA10301-DPB17501 DPA10301-DPB18001 DPA10401-DPB10201 DPA10401-DPB10202 DPA10401-DPB10402 DPA10401-DPB10501 DPA10401-DPB110501; note = HLAs: DPA10401-DPB14901
PPFLWFGIELVPDK

SEQ ID NO: 6871 - protein, 14 aa, synthetic construct
  source 1..14: note = Seed: PPFLWMGYELHPDK; note = HLAs: DPA10103-DPB10101 DPA10103-DPB10201 DPA10103-DPB10202 DPA10103-DPB10401 DPA10103-DPB112601 DPA10103-DPB11501 DPA10103-DPB11601 DPA10103-DPB11901 DPA10103-DPB12301 DPA10103-DPB13101 DPA10103-DPB13401 DPA10103-DPB13901 DPA10103-DPB14001 DPA10103-DPB14101 DPA10103-DPB14801 DPA10103-DPB15001 DPA10103-DPB15901 DPA10104-DPB10101 DPA10104-DPB11501 DPA10105-DPB10101 DPA10105-DPB10401 DPA10105-DPB15001 DPA10106-DPB10101 DPA10201-DPB10101 DPA10201-DPB110601 DPA10201-DPB11501 DPA10201-DPB11601 DPA10201-DPB11901 DPA10202-DPB10101 DPA10202-DPB10201 DPA10202-DPB10202 DPA10202-DPB10401 DPA10202-DPB110601 DPA10202-DPB11901 DPA10202-DPB13101 DPA10202-DPB16501 DPA10301-DPB10101 DPA10301-DPB10201 DPA10301-DPB10202 DPA10301-DPB10401 DPA10301-DPB10402 DPA10301-DPB110501 DPA10301-DPB110601 DPA10301-DPB11801 DPA10301-DPB12301 DPA10301-DPB13901 DPA10301-DPB14001 DPA10301-DPB14901 DPA10301-DPB15501 DPA10301-DPB16501 DPA10301-DPB17501 DPA10301-DPB18001 DPA10401-DPB10101 DPA10401-DPB10201; note = HLAs: DPA10401-DPB10202 DPA10401-DPB10402 DPA10401-DPB10501 DPA10401-DPB110501 DPA10401-DPB14901
PPLLWKGFELIPDK

SEQ ID NO: 6872 - protein, 14 aa, synthetic construct
  source 1..14: note = Seed: PPFLWMGYELHPDK; note = HLAs: DRB1_1001 DPA10103-DPB10101 DPA10103-DPB10201 DPA10103-DPB10202 DPA10103-DPB10401 DPA10103-DPB112601 DPA10103-DPB11501 DPA10103-DPB11601 DPA10103-DPB11901 DPA10103-DPB12301 DPA10103-DPB13101 DPA10103-DPB13401 DPA10103-DPB13901 DPA10103-DPB14001 DPA10103-DPB14101 DPA10103-DPB14801 DPA10103-DPB15001 DPA10103-DPB15901 DPA10104-DPB10101 DPA10104-DPB11501 DPA10105-DPB10101 DPA10105-DPB10401 DPA10105-DPB15001 DPA10106-DPB10101 DPA10201-DPB10101 DPA10201-DPB110601 DPA10201-DPB11501 DPA10201-DPB11601 DPA10201-DPB11901 DPA10202-DPB10101 DPA10202-DPB10201 DPA10202-DPB10202 DPA10202-DPB10401 DPA10202-DPB110601 DPA10202-DPB11901 DPA10202-DPB13101 DPA10202-DPB16501 DPA10301-DPB10101 DPA10301-DPB10201 DPA10301-DPB10202 DPA10301-DPB10401 DPA10301-DPB10402 DPA10301-DPB110501 DPA10301-DPB110601 DPA10301-DPB11801 DPA10301-DPB12301 DPA10301-DPB13901 DPA10301-DPB14001 DPA10301-DPB14901 DPA10301-DPB15501 DPA10301-DPB16501 DPA10301-DPB17501 DPA10301-DPB18001 DPA10401-DPB10101 DPA10401-DPB10201; note = HLAs: DPA10401-DPB10202 DPA10401-DPB10402 DPA10401-DPB10501 DPA10401-DPB110501 DPA10401-DPB14901
PPFLWAGIELVPDK

SEQ ID NO: 6873 - protein, 20 aa, synthetic construct
  source 1..20: note = Seed: KEPPFLWMGYELHPDKWTVQ; note = HLAs: DPA10103-DPB10101 DPA10103-DPB10201 DPA10103-DPB10202 DPA10103-DPB10401 DPA10103-DPB10402 DPA10103-DPB10501 DPA10103-DPB110501 DPA10103-DPB112601 DPA10103-DPB11501 DPA10103-DPB11601 DPA10103-DPB11801 DPA10103-DPB11901 DPA10103-DPB12301 DPA10103-DPB13101 DPA10103-DPB13401 DPA10103-DPB13901 DPA10103-DPB14001 DPA10103-DPB14101 DPA10103-DPB14801 DPA10103-DPB14901 DPA10103-DPB15001 DPA10103-DPB15101 DPA10103-DPB15501 DPA10103-DPB15901 DPA10103-DPB18001 DPA10104-DPB10101 DPA10104-DPB11501 DPA10105-DPB10101 DPA10105-DPB10401 DPA10105-DPB11801 DPA10105-DPB15001 DPA10106-DPB10101 DPA10201-DPB10101 DPA10201-DPB10201 DPA10201-DPB10202 DPA10201-DPB10401 DPA10201-DPB10501 DPA10201-DPB110601 DPA10201-DPB11501 DPA10201-DPB11601 DPA10201-DPB11901 DPA10201-DPB13401 DPA10201-DPB15501 DPA10202-DPB10101 DPA10202-DPB10201 DPA10202-DPB10202 DPA10202-DPB10401 DPA10202-DPB10501 DPA10202-DPB110601 DPA10202-DPB11101 DPA10202-DPB11301 DPA10202-DPB11801 DPA10202-DPB11901 DPA10202-DPB13101 DPA10202-DPB13801; note = HLAs: DPA10202-DPB15501 DPA10202-DPB16501 DPA10301-DPB10101 DPA10301-DPB10201 DPA10301-DPB10202 DPA10301-DPB10401 DPA10301-DPB10402 DPA10301-DPB110501 DPA10301-DPB110601 DPA10301-DPB11101 DPA10301-DPB11301 DPA10301-DPB11801 DPA10301-DPB12301 DPA10301-DPB13901 DPA10301-DPB14001 DPA10301-DPB14901 DPA10301-DPB15501 DPA10301-DPB16501 DPA10301-DPB17501 DPA10301-DPB18001 DPA10401-DPB10101 DPA10401-DPB10201 DPA10401-DPB10202 DPA10401-DPB10402 DPA10401-DPB10501 DPA10401-DPB110501 DPA10401-DPB14901
KEPPWLWEGFELMPDKWTVQ

SEQ ID NO: 6874 - protein, 20 aa, synthetic construct
  source 1..20: note = Seed: KEPPFLWMGYELHPDKWTVQ; note = HLAs: DRB1_0101 DPA10103-DPB10101 DPA10103-DPB10201 DPA10103-DPB10202 DPA10103-DPB10401 DPA10103-DPB10402 DPA10103-DPB10501 DPA10103-DPB110501 DPA10103-DPB112601 DPA10103-DPB11501 DPA10103-DPB11601 DPA10103-DPB11801 DPA10103-DPB11901 DPA10103-DPB12301 DPA10103-DPB13101 DPA10103-DPB13401 DPA10103-DPB13901 DPA10103-DPB14001 DPA10103-DPB14101 DPA10103-DPB14801 DPA10103-DPB14901 DPA10103-DPB15001 DPA10103-DPB15101 DPA10103-DPB15501 DPA10103-DPB15901 DPA10103-DPB18001 DPA10104-DPB10101 DPA10104-DPB11501 DPA10105-DPB10101 DPA10105-DPB10401 DPA10105-DPB11801 DPA10105-DPB15001 DPA10106-DPB10101 DPA10201-DPB10101 DPA10201-DPB10201 DPA10201-DPB10202 DPA10201-DPB10401 DPA10201-DPB10501 DPA10201-DPB110601 DPA10201-DPB11501 DPA10201-DPB11601 DPA10201-DPB11901 DPA10201-DPB13401 DPA10201-DPB15501 DPA10202-DPB10101 DPA10202-DPB10201 DPA10202-DPB10202 DPA10202-DPB10401 DPA10202-DPB10501 DPA10202-DPB110601 DPA10202-DPB11101 DPA10202-DPB11301 DPA10202-DPB11801 DPA10202-DPB11901 DPA10202-DPB13101; note = HLAs: DPA10202-DPB13801 DPA10202-DPB15501 DPA10202-DPB16501 DPA10301-DPB10101 DPA10301-DPB10201 DPA10301-DPB10202 DPA10301-DPB10401 DPA10301-DPB10402 DPA10301-DPB110501 DPA10301-DPB110601 DPA10301-DPB11101 DPA10301-DPB11301 DPA10301-DPB11801 DPA10301-DPB12301 DPA10301-DPB13901 DPA10301-DPB14001 DPA10301-DPB14901 DPA10301-DPB15501 DPA10301-DPB16501 DPA10301-DPB17501 DPA10301-DPB18001 DPA10401-DPB10101 DPA10401-DPB10201 DPA10401-DPB10202 DPA10401-DPB10402 DPA10401-DPB10501 DPA10401-DPB110501 DPA10401-DPB14901
KEPPMLWQGFELVPDKWTVQ

SEQ ID NO: 6875 - protein, 14 aa, synthetic construct
  source 1..14: note = Seed: PPFLWMGYELHPDK; note = HLAs: DPA10103-DPB10201 DPA10103-DPB10202 DPA10103-DPB10401 DPA10103-DPB112601 DPA10103-DPB11501 DPA10103-DPB11601 DPA10103-DPB11901 DPA10103-DPB12301 DPA10103-DPB13101 DPA10103-DPB13401 DPA10103-DPB13901 DPA10103-DPB14001 DPA10103-DPB14101 DPA10103-DPB14801 DPA10103-DPB15001 DPA10103-DPB15901 DPA10104-DPB11501 DPA10105-DPB10401 DPA10105-DPB15001 DPA10106-DPB10101 DPA10201-DPB10101 DPA10201-DPB110601 DPA10201-DPB11501 DPA10201-DPB11601 DPA10201-DPB11901 DPA10202-DPB10101 DPA10202-DPB10201 DPA10202-DPB10202 DPA10202-DPB10401 DPA10202-DPB110601 DPA10202-DPB11901 DPA10202-DPB13101 DPA10202-DPB16501 DPA10301-DPB10201 DPA10301-DPB10202 DPA10301-DPB10401 DPA10301-DPB10402 DPA10301-DPB110501 DPA10301-DPB110601 DPA10301-DPB11801 DPA10301-DPB12301 DPA10301-DPB13901 DPA10301-DPB14001 DPA10301-DPB14901 DPA10301-DPB16501 DPA10301-DPB17501 DPA10301-DPB18001 DPA10401-DPB10201 DPA10401-DPB10202 DPA10401-DPB10402 DPA10401-DPB10501 DPA10401-DPB110501 DPA10401-DPB14901
PPLLWWGFELLPDK

SEQ ID NO: 6876 - protein, 14 aa, synthetic construct
  source 1..14: note = Seed: PPFLWMGYELHPDK; note = HLAs: DRB1_1001 DPA10103-DPB10101 DPA10103-DPB10201 DPA10103-DPB10202 DPA10103-DPB10401 DPA10103-DPB112601 DPA10103-DPB11501 DPA10103-DPB11601 DPA10103-DPB11901 DPA10103-DPB12301 DPA10103-DPB13101 DPA10103-DPB13401 DPA10103-DPB13901 DPA10103-DPB14001 DPA10103-DPB14101 DPA10103-DPB14801 DPA10103-DPB15001 DPA10103-DPB15901 DPA10104-DPB10101 DPA10104-DPB11501 DPA10105-DPB10101 DPA10105-DPB10401 DPA10105-DPB15001 DPA10106-DPB10101 DPA10201-DPB10101 DPA10201-DPB110601 DPA10201-DPB11501 DPA10201-DPB11601 DPA10201-DPB11901 DPA10202-DPB10101 DPA10202-DPB10201 DPA10202-DPB10202 DPA10202-DPB10401 DPA10202-DPB110601 DPA10202-DPB11901 DPA10202-DPB13101 DPA10202-DPB16501 DPA10301-DPB10101 DPA10301-DPB10201 DPA10301-DPB10202 DPA10301-DPB10401 DPA10301-DPB10402 DPA10301-DPB110501 DPA10301-DPB110601 DPA10301-DPB11801 DPA10301-DPB12301 DPA10301-DPB13901 DPA10301-DPB14001 DPA10301-DPB14901 DPA10301-DPB15501 DPA10301-DPB16501 DPA10301-DPB17501 DPA10301-DPB18001 DPA10401-DPB10101 DPA10401-DPB10201; note = HLAs: DPA10401-DPB10202 DPA10401-DPB10402 DPA10401-DPB10501 DPA10401-DPB110501 DPA10401-DPB14901
PPFLWMGFELHPDK

SEQ ID NO: 6877 - protein, 20 aa, synthetic construct
  source 1..20: note = Seed: KEPPFLWMGYELHPDKWTVQ; note = HLAs: DRB1_0101 DRB1_1001 DPA10103-DPB10101 DPA10103-DPB10201 DPA10103-DPB10202 DPA10103-DPB10401 DPA10103-DPB10402 DPA10103-DPB10501 DPA10103-DPB110501 DPA10103-DPB112601 DPA10103-DPB11501 DPA10103-DPB11601 DPA10103-DPB11801 DPA10103-DPB11901 DPA10103-DPB12301 DPA10103-DPB13401 DPA10103-DPB13901 DPA10103-DPB14001 DPA10103-DPB14101 DPA10103-DPB14801 DPA10103-DPB14901 DPA10103-DPB15001 DPA10103-DPB15101 DPA10103-DPB15501 DPA10103-DPB15901 DPA10103-DPB18001 DPA10104-DPB10101 DPA10104-DPB11501 DPA10105-DPB10101 DPA10105-DPB10401 DPA10105-DPB11801 DPA10105-DPB15001 DPA10106-DPB10101 DPA10201-DPB10101 DPA10201-DPB10201 DPA10201-DPB10202 DPA10201-DPB10401 DPA10201-DPB10501 DPA10201-DPB110601 DPA10201-DPB11501 DPA10201-DPB11601 DPA10201-DPB11901 DPA10201-DPB13401 DPA10201-DPB15501 DPA10202-DPB10101 DPA10202-DPB10201 DPA10202-DPB10202 DPA10202-DPB10401 DPA10202-DPB10501 DPA10202-DPB110601 DPA10202-DPB11101 DPA10202-DPB11301 DPA10202-DPB11801 DPA10202-DPB11901 DPA10202-DPB13101; note = HLAs: DPA10202-DPB13801 DPA10202-DPB15501 DPA10202-DPB16501 DPA10301-DPB10101 DPA10301-DPB10201 DPA10301-DPB10202 DPA10301-DPB10401 DPA10301-DPB10402 DPA10301-DPB110501 DPA10301-DPB110601 DPA10301-DPB11101 DPA10301-DPB11301 DPA10301-DPB11801 DPA10301-DPB12301 DPA10301-DPB13901 DPA10301-DPB14001 DPA10301-DPB14901 DPA10301-DPB15501 DPA10301-DPB16501 DPA10301-DPB17501 DPA10301-DPB18001 DPA10401-DPB10101 DPA10401-DPB10201 DPA10401-DPB10202 DPA10401-DPB10402 DPA10401-DPB10501 DPA10401-DPB110501 DPA10401-DPB14901
KEPPFLWIGIELLPDKWTVQ

SEQ ID NO: 6878 - protein, 14 aa, synthetic construct
  source 1..14: note = Seed: PPFLWMGYELHPDK; note = HLAs: DPA10103-DPB10101 DPA10103-DPB10201 DPA10103-DPB10202 DPA10103-DPB10401 DPA10103-DPB112601 DPA10103-DPB11501 DPA10103-DPB11601 DPA10103-DPB11901 DPA10103-DPB12301 DPA10103-DPB13101 DPA10103-DPB13401 DPA10103-DPB13901 DPA10103-DPB14001 DPA10103-DPB14101 DPA10103-DPB14801 DPA10103-DPB15001 DPA10103-DPB15901 DPA10104-DPB10101 DPA10104-DPB11501 DPA10105-DPB10101 DPA10105-DPB10401 DPA10105-DPB15001 DPA10106-DPB10101 DPA10201-DPB10101 DPA10201-DPB110601 DPA10201-DPB11501 DPA10201-DPB11601 DPA10201-DPB11901 DPA10202-DPB10101 DPA10202-DPB10201 DPA10202-DPB10202 DPA10202-DPB10401 DPA10202-DPB110601 DPA10202-DPB11901 DPA10202-DPB13101 DPA10202-DPB16501 DPA10301-DPB10101 DPA10301-DPB10201 DPA10301-DPB10202 DPA10301-DPB10401 DPA10301-DPB10402 DPA10301-DPB110501 DPA10301-DPB110601 DPA10301-DPB11801 DPA10301-DPB12301 DPA10301-DPB13901 DPA10301-DPB14001 DPA10301-DPB14901 DPA10301-DPB15501 DPA10301-DPB16501 DPA10301-DPB17501 DPA10301-DPB18001 DPA10401-DPB10101 DPA10401-DPB10201; note = HLAs: DPA10401-DPB10202 DPA10401-DPB10402 DPA10401-DPB10501 DPA10401-DPB110501 DPA10401-DPB14901
PPLLWIGFELYPDK

SEQ ID NO: 6879 - protein, 20 aa, synthetic construct
  source 1..20: note = Seed: KEPPFLWMGYELHPDKWTVQ; note = HLAs: DRB1_1001 DPA10103-DPB10101 DPA10103-DPB10201 DPA10103-DPB10202 DPA10103-DPB10401 DPA10103-DPB10402 DPA10103-DPB10501 DPA10103-DPB110501 DPA10103-DPB112601 DPA10103-DPB11501 DPA10103-DPB11601 DPA10103-DPB11801 DPA10103-DPB11901 DPA10103-DPB12301 DPA10103-DPB13101 DPA10103-DPB13401 DPA10103-DPB13901 DPA10103-DPB14001 DPA10103-DPB14101 DPA10103-DPB14801 DPA10103-DPB14901 DPA10103-DPB15001 DPA10103-DPB15101 DPA10103-DPB15501 DPA10103-DPB15901 DPA10103-DPB18001 DPA10104-DPB10101 DPA10104-DPB11501 DPA10105-DPB10101 DPA10105-DPB10401 DPA10105-DPB11801 DPA10105-DPB15001 DPA10106-DPB10101 DPA10201-DPB10101 DPA10201-DPB10201 DPA10201-DPB10202 DPA10201-DPB10401 DPA10201-DPB10501 DPA10201-DPB110601 DPA10201-DPB11501 DPA10201-DPB11601 DPA10201-DPB11901 DPA10201-DPB13401 DPA10201-DPB15501 DPA10202-DPB10101 DPA10202-DPB10201 DPA10202-DPB10202 DPA10202-DPB10401 DPA10202-DPB10501 DPA10202-DPB110601 DPA10202-DPB11101 DPA10202-DPB11301 DPA10202-DPB11801 DPA10202-DPB11901 DPA10202-DPB13101; note = HLAs: DPA10202-DPB13801 DPA10202-DPB15501 DPA10202-DPB16501 DPA10301-DPB10101 DPA10301-DPB10201 DPA10301-DPB10202 DPA10301-DPB10401 DPA10301-DPB10402 DPA10301-DPB110501 DPA10301-DPB110601 DPA10301-DPB11101 DPA10301-DPB11301 DPA10301-DPB11801 DPA10301-DPB12301 DPA10301-DPB13901 DPA10301-DPB14001 DPA10301-DPB14901 DPA10301-DPB15501 DPA10301-DPB16501 DPA10301-DPB17501 DPA10301-DPB18001 DPA10401-DPB10101 DPA10401-DPB10201 DPA10401-DPB10202 DPA10401-DPB10402 DPA10401-DPB10501 DPA10401-DPB110501 DPA10401-DPB14901
KEPPFLWSGFELCPDKWTVQ

SEQ ID NO: 6880 - protein, 20 aa, synthetic construct
  source 1..20: note = Seed: KEPPFLWMGYELHPDKWTVQ; note = HLAs: DPA10103-DPB10101 DPA10103-DPB10201 DPA10103-DPB10202 DPA10103-DPB10401 DPA10103-DPB10402 DPA10103-DPB10501 DPA10103-DPB110501 DPA10103-DPB112601 DPA10103-DPB11501 DPA10103-DPB11601 DPA10103-DPB11801 DPA10103-DPB11901 DPA10103-DPB12301 DPA10103-DPB13101 DPA10103-DPB13401 DPA10103-DPB13901 DPA10103-DPB14001 DPA10103-DPB14101 DPA10103-DPB14801 DPA10103-DPB14901 DPA10103-DPB15001 DPA10103-DPB15101 DPA10103-DPB15501 DPA10103-DPB15901 DPA10103-DPB18001 DPA10104-DPB10101 DPA10104-DPB11501 DPA10105-DPB10101 DPA10105-DPB10401 DPA10105-DPB11801 DPA10105-DPB15001 DPA10106-DPB10101 DPA10201-DPB10101 DPA10201-DPB10201 DPA10201-DPB10202 DPA10201-DPB10401 DPA10201-DPB10501 DPA10201-DPB110601 DPA10201-DPB11501 DPA10201-DPB11601 DPA10201-DPB11901 DPA10201-DPB13401 DPA10201-DPB15501 DPA10202-DPB10101 DPA10202-DPB10201 DPA10202-DPB10202 DPA10202-DPB10401 DPA10202-DPB10501 DPA10202-DPB110601 DPA10202-DPB11101 DPA10202-DPB11301 DPA10202-DPB11801 DPA10202-DPB11901 DPA10202-DPB13101 DPA10202-DPB13801; note = HLAs: DPA10202-DPB15501 DPA10202-DPB16501 DPA10301-DPB10101 DPA10301-DPB10201 DPA10301-DPB10202 DPA10301-DPB10401 DPA10301-DPB10402 DPA10301-DPB110501 DPA10301-DPB110601 DPA10301-DPB11101 DPA10301-DPB11301 DPA10301-DPB11801 DPA10301-DPB12301 DPA10301-DPB13901 DPA10301-DPB14001 DPA10301-DPB14901 DPA10301-DPB15501 DPA10301-DPB16501 DPA10301-DPB17501 DPA10301-DPB18001 DPA10401-DPB10101 DPA10401-DPB10201 DPA10401-DPB10202 DPA10401-DPB10402 DPA10401-DPB10501 DPA10401-DPB110501 DPA10401-DPB14901
KEPPMLWSGFELFPDKWTVQ

SEQ ID NO: 6881 - protein, 14 aa, synthetic construct
  source 1..14: note = Seed: PPFLWMGYELHPDK; note = HLAs: DPA10103-DPB10101 DPA10103-DPB10201 DPA10103-DPB10202 DPA10103-DPB10401 DPA10103-DPB112601 DPA10103-DPB11501 DPA10103-DPB11601 DPA10103-DPB11901 DPA10103-DPB12301 DPA10103-DPB13101 DPA10103-DPB13401 DPA10103-DPB13901 DPA10103-DPB14001 DPA10103-DPB14101 DPA10103-DPB14801 DPA10103-DPB15001 DPA10103-DPB15901 DPA10104-DPB10101 DPA10104-DPB11501 DPA10105-DPB10101 DPA10105-DPB10401 DPA10105-DPB15001 DPA10106-DPB10101 DPA10201-DPB10101 DPA10201-DPB110601 DPA10201-DPB11501 DPA10201-DPB11601 DPA10201-DPB11901 DPA10202-DPB10101 DPA10202-DPB10201 DPA10202-DPB10202 DPA10202-DPB10401 DPA10202-DPB110601 DPA10202-DPB11901 DPA10202-DPB13101 DPA10202-DPB16501 DPA10301-DPB10101 DPA10301-DPB10201 DPA10301-DPB10202 DPA10301-DPB10401 DPA10301-DPB10402 DPA10301-DPB110501 DPA10301-DPB110601 DPA10301-DPB11801 DPA10301-DPB12301 DPA10301-DPB13901 DPA10301-DPB14001 DPA10301-DPB14901 DPA10301-DPB15501 DPA10301-DPB16501 DPA10301-DPB17501 DPA10301-DPB18001 DPA10401-DPB10101 DPA10401-DPB10201; note = HLAs: DPA10401-DPB10202 DPA10401-DPB10402 DPA10401-DPB10501 DPA10401-DPB110501 DPA10401-DPB14901
PPFLWQGYELFPDK

SEQ ID NO: 6882 - protein, 20 aa, synthetic construct
  source 1..20: note = Seed: KEPPFLWMGYELHPDKWTVQ; note = HLAs: DRB1_0101 DRB1_1001 DPA10103-DPB10101 DPA10103-DPB10201 DPA10103-DPB10202 DPA10103-DPB10401 DPA10103-DPB10402 DPA10103-DPB10501 DPA10103-DPB110501 DPA10103-DPB112601 DPA10103-DPB11501 DPA10103-DPB11601 DPA10103-DPB11801 DPA10103-DPB11901 DPA10103-DPB12301 DPA10103-DPB13101 DPA10103-DPB13401 DPA10103-DPB13901 DPA10103-DPB14001 DPA10103-DPB14101 DPA10103-DPB14801 DPA10103-DPB14901 DPA10103-DPB15001 DPA10103-DPB15101 DPA10103-DPB15501 DPA10103-DPB15901 DPA10103-DPB18001 DPA10104-DPB10101 DPA10104-DPB11501 DPA10105-DPB10101 DPA10105-DPB10401 DPA10105-DPB11801 DPA10105-DPB15001 DPA10106-DPB10101 DPA10201-DPB10101 DPA10201-DPB10201 DPA10201-DPB10202 DPA10201-DPB10401 DPA10201-DPB10501 DPA10201-DPB110601 DPA10201-DPB11501 DPA10201-DPB11601 DPA10201-DPB11901 DPA10201-DPB13401 DPA10201-DPB15501 DPA10202-DPB10101 DPA10202-DPB10201 DPA10202-DPB10202 DPA10202-DPB10401 DPA10202-DPB10501 DPA10202-DPB110601 DPA10202-DPB11101 DPA10202-DPB11301 DPA10202-DPB11801 DPA10202-DPB11901; note = HLAs: DPA10202-DPB13101 DPA10202-DPB13801 DPA10202-DPB15501 DPA10202-DPB16501 DPA10301-DPB10101 DPA10301-DPB10201 DPA10301-DPB10202 DPA10301-DPB10401 DPA10301-DPB10402 DPA10301-DPB110501 DPA10301-DPB110601 DPA10301-DPB11101 DPA10301-DPB11301 DPA10301-DPB11801 DPA10301-DPB12301 DPA10301-DPB13901 DPA10301-DPB14001 DPA10301-DPB14901 DPA10301-DPB15501 DPA10301-DPB16501 DPA10301-DPB17501 DPA10301-DPB18001 DPA10401-DPB10101 DPA10401-DPB10201 DPA10401-DPB10202 DPA10401-DPB10402 DPA10401-DPB10501 DPA10401-DPB110501 DPA10401-DPB14901
KEPPYLWAGFELNPDKWTVQ

SEQ ID NO: 6883 - protein, 14 aa, synthetic construct
  source 1..14: note = Seed: PPFLWMGYELHPDK; note = HLAs: DPA10103-DPB10101 DPA10103-DPB10201 DPA10103-DPB10202 DPA10103-DPB10401 DPA10103-DPB112601 DPA10103-DPB11501 DPA10103-DPB11601 DPA10103-DPB11901 DPA10103-DPB12301 DPA10103-DPB13101 DPA10103-DPB13401 DPA10103-DPB13901 DPA10103-DPB14001 DPA10103-DPB14101 DPA10103-DPB14801 DPA10103-DPB15001 DPA10103-DPB15901 DPA10104-DPB10101 DPA10104-DPB11501 DPA10105-DPB10101 DPA10105-DPB10401 DPA10105-DPB15001 DPA10106-DPB10101 DPA10201-DPB10101 DPA10201-DPB110601 DPA10201-DPB11501 DPA10201-DPB11601 DPA10201-DPB11901 DPA10202-DPB10101 DPA10202-DPB10201 DPA10202-DPB10202 DPA10202-DPB10401 DPA10202-DPB110601 DPA10202-DPB11901 DPA10202-DPB13101 DPA10202-DPB16501 DPA10301-DPB10101 DPA10301-DPB10201 DPA10301-DPB10202 DPA10301-DPB10401 DPA10301-DPB10402 DPA10301-DPB110501 DPA10301-DPB110601 DPA10301-DPB11801 DPA10301-DPB12301 DPA10301-DPB13901 DPA10301-DPB14001 DPA10301-DPB14901 DPA10301-DPB16501 DPA10301-DPB17501 DPA10301-DPB18001 DPA10401-DPB10101 DPA10401-DPB10201 DPA10401-DPB10202; note = HLAs: DPA10401-DPB10402 DPA10401-DPB10501 DPA10401-DPB110501 DPA10401-DPB14901
PPMLWNGFELLPDK

SEQ ID NO: 6884 - protein, 14 aa, synthetic construct
  source 1..14: note = Seed: PPFLWMGYELHPDK; note = HLAs: DPA10103-DPB10101 DPA10103-DPB10201 DPA10103-DPB10202 DPA10103-DPB10401 DPA10103-DPB112601 DPA10103-DPB11601 DPA10103-DPB11901 DPA10103-DPB12301 DPA10103-DPB13101 DPA10103-DPB13401 DPA10103-DPB13901 DPA10103-DPB14001 DPA10103-DPB14101 DPA10103-DPB14801 DPA10104-DPB10101 DPA10105-DPB10101 DPA10105-DPB10401 DPA10201-DPB110601 DPA10201-DPB11601 DPA10201-DPB11901 DPA10202-DPB10201 DPA10202-DPB10202 DPA10202-DPB110601 DPA10202-DPB11901 DPA10202-DPB13101 DPA10301-DPB10201 DPA10301-DPB10202 DPA10301-DPB10402 DPA10301-DPB110501 DPA10301-DPB110601 DPA10301-DPB14901 DPA10301-DPB17501 DPA10301-DPB18001 DPA10401-DPB10201 DPA10401-DPB10202
PPCLWAGFELLPDK

SEQ ID NO: 6885 - protein, 20 aa, synthetic construct
  source 1..20: note = Seed: KEPPFLWMGYELHPDKWTVQ; note = HLAs: DPA10103-DPB10101 DPA10103-DPB10201 DPA10103-DPB10202 DPA10103-DPB10401 DPA10103-DPB10402 DPA10103-DPB10501 DPA10103-DPB110501 DPA10103-DPB112601 DPA10103-DPB11501 DPA10103-DPB11601 DPA10103-DPB11801 DPA10103-DPB11901 DPA10103-DPB12301 DPA10103-DPB13101 DPA10103-DPB13401 DPA10103-DPB13901 DPA10103-DPB14001 DPA10103-DPB14101 DPA10103-DPB14801 DPA10103-DPB14901 DPA10103-DPB15001 DPA10103-DPB15101 DPA10103-DPB15501 DPA10103-DPB15901 DPA10103-DPB18001 DPA10104-DPB10101 DPA10104-DPB11501 DPA10105-DPB10101 DPA10105-DPB10401 DPA10105-DPB11801 DPA10105-DPB15001 DPA10106-DPB10101 DPA10201-DPB10101 DPA10201-DPB10201 DPA10201-DPB10202 DPA10201-DPB10401 DPA10201-DPB10501 DPA10201-DPB110601 DPA10201-DPB11501 DPA10201-DPB11601 DPA10201-DPB11901 DPA10201-DPB13401 DPA10201-DPB15501 DPA10202-DPB10101 DPA10202-DPB10201 DPA10202-DPB10202 DPA10202-DPB10401 DPA10202-DPB10501 DPA10202-DPB110601 DPA10202-DPB11101 DPA10202-DPB11301 DPA10202-DPB11801 DPA10202-DPB11901 DPA10202-DPB13101 DPA10202-DPB13801; note = HLAs: DPA10202-DPB15501 DPA10202-DPB16501 DPA10301-DPB10101 DPA10301-DPB10201 DPA10301-DPB10202 DPA10301-DPB10401 DPA10301-DPB10402 DPA10301-DPB110501 DPA10301-DPB110601 DPA10301-DPB11301 DPA10301-DPB11801 DPA10301-DPB12301 DPA10301-DPB13901 DPA10301-DPB14001 DPA10301-DPB14901 DPA10301-DPB15501 DPA10301-DPB16501 DPA10301-DPB17501 DPA10301-DPB18001 DPA10401-DPB10101 DPA10401-DPB10201 DPA10401-DPB10202 DPA10401-DPB10402 DPA10401-DPB10501 DPA10401-DPB110501 DPA10401-DPB14901
KEPPMLWNGFELLPDKWTVQ

SEQ ID NO: 6886 - protein, 20 aa, synthetic construct
  source 1..20: note = Seed: KEPPFLWMGYELHPDKWTVQ; note = HLAs: DRB1_0101 DRB1_1001 DPA10103-DPB10101 DPA10103-DPB10201 DPA10103-DPB10202 DPA10103-DPB10401 DPA10103-DPB10402 DPA10103-DPB10501 DPA10103-DPB110501 DPA10103-DPB112601 DPA10103-DPB11501 DPA10103-DPB11601 DPA10103-DPB11801 DPA10103-DPB11901 DPA10103-DPB12301 DPA10103-DPB13101 DPA10103-DPB13401 DPA10103-DPB13901 DPA10103-DPB14001 DPA10103-DPB14101 DPA10103-DPB14801 DPA10103-DPB14901 DPA10103-DPB15001 DPA10103-DPB15101 DPA10103-DPB15501 DPA10103-DPB15901 DPA10103-DPB18001 DPA10104-DPB10101 DPA10104-DPB11501 DPA10105-DPB10101 DPA10105-DPB10401 DPA10105-DPB11801 DPA10105-DPB15001 DPA10106-DPB10101 DPA10201-DPB10101 DPA10201-DPB10201 DPA10201-DPB10202 DPA10201-DPB10401 DPA10201-DPB10501 DPA10201-DPB110601 DPA10201-DPB11501 DPA10201-DPB11601 DPA10201-DPB11901 DPA10201-DPB13401 DPA10201-DPB15501 DPA10202-DPB10101 DPA10202-DPB10201 DPA10202-DPB10202 DPA10202-DPB10401 DPA10202-DPB10501 DPA10202-DPB110601 DPA10202-DPB11101 DPA10202-DPB11301 DPA10202-DPB11801 DPA10202-DPB11901; note = HLAs: DPA10202-DPB13101 DPA10202-DPB13801 DPA10202-DPB15501 DPA10202-DPB16501 DPA10301-DPB10101 DPA10301-DPB10201 DPA10301-DPB10202 DPA10301-DPB10401 DPA10301-DPB10402 DPA10301-DPB110501 DPA10301-DPB110601 DPA10301-DPB11101 DPA10301-DPB11301 DPA10301-DPB11801 DPA10301-DPB12301 DPA10301-DPB13901 DPA10301-DPB14001 DPA10301-DPB14901 DPA10301-DPB15501 DPA10301-DPB16501 DPA10301-DPB17501 DPA10301-DPB18001 DPA10401-DPB10101 DPA10401-DPB10201 DPA10401-DPB10202 DPA10401-DPB10402 DPA10401-DPB10501 DPA10401-DPB110501 DPA10401-DPB14901
KEPPFLWSGWELTPDKWTVQ

SEQ ID NO: 6887 - protein, 14 aa, synthetic construct
  source 1..14: note = Seed: PPFLWMGYELHPDK; note = HLAs: DPA10103-DPB10201 DPA10103-DPB10202 DPA10103-DPB10401 DPA10103-DPB112601 DPA10103-DPB11501 DPA10103-DPB11601 DPA10103-DPB11901 DPA10103-DPB12301 DPA10103-DPB13401 DPA10103-DPB13901 DPA10103-DPB14001 DPA10103-DPB14101 DPA10103-DPB14801 DPA10104-DPB11501 DPA10105-DPB10401 DPA10106-DPB10101 DPA10201-DPB10101 DPA10201-DPB110601 DPA10201-DPB11501 DPA10201-DPB11601 DPA10201-DPB11901 DPA10202-DPB10201 DPA10202-DPB10202 DPA10202-DPB10401 DPA10202-DPB110601 DPA10202-DPB11901 DPA10202-DPB16501 DPA10301-DPB10201 DPA10301-DPB10202 DPA10301-DPB10401 DPA10301-DPB10402 DPA10301-DPB110501 DPA10301-DPB110601 DPA10301-DPB11801 DPA10301-DPB12301 DPA10301-DPB13901 DPA10301-DPB14001 DPA10301-DPB14901 DPA10301-DPB17501 DPA10301-DPB18001 DPA10401-DPB10201 DPA10401-DPB10202 DPA10401-DPB10402 DPA10401-DPB10501 DPA10401-DPB110501 DPA10401-DPB14901
PPLLWYGFELLPDK

SEQ ID NO: 6888 - protein, 14 aa, synthetic construct
  source 1..14: note = Seed: PPFLWMGYELHPDK; note = HLAs: DPA10103-DPB10101 DPA10103-DPB10201 DPA10103-DPB10202 DPA10103-DPB10401 DPA10103-DPB112601 DPA10103-DPB11501 DPA10103-DPB11601 DPA10103-DPB11901 DPA10103-DPB12301 DPA10103-DPB13101 DPA10103-DPB13401 DPA10103-DPB13901 DPA10103-DPB14001 DPA10103-DPB14101 DPA10103-DPB14801 DPA10103-DPB15001 DPA10103-DPB15901 DPA10104-DPB10101 DPA10104-DPB11501 DPA10105-DPB10101 DPA10105-DPB10401 DPA10105-DPB15001 DPA10106-DPB10101 DPA10201-DPB10101 DPA10201-DPB110601 DPA10201-DPB11501 DPA10201-DPB11601 DPA10201-DPB11901 DPA10202-DPB10101 DPA10202-DPB10201 DPA10202-DPB10202 DPA10202-DPB10401 DPA10202-DPB110601 DPA10202-DPB11901 DPA10202-DPB13101 DPA10202-DPB16501 DPA10301-DPB10101 DPA10301-DPB10201 DPA10301-DPB10202 DPA10301-DPB10401 DPA10301-DPB10402 DPA10301-DPB110501 DPA10301-DPB110601 DPA10301-DPB11801 DPA10301-DPB12301 DPA10301-DPB13901 DPA10301-DPB14001 DPA10301-DPB14901 DPA10301-DPB15501 DPA10301-DPB16501 DPA10301-DPB17501 DPA10301-DPB18001 DPA10401-DPB10101 DPA10401-DPB10201; note = HLAs: DPA10401-DPB10202 DPA10401-DPB10402 DPA10401-DPB10501 DPA10401-DPB110501 DPA10401-DPB14901
PPFLWFGLELVPDK

SEQ ID NO: 6889 - protein, 14 aa, synthetic construct
  source 1..14: note = Seed: PPFLWMGYELHPDK; note = HLAs: DRB1_1001 DPA10103-DPB10101 DPA10103-DPB10201 DPA10103-DPB10202 DPA10103-DPB10401 DPA10103-DPB112601 DPA10103-DPB11501 DPA10103-DPB11601 DPA10103-DPB11901 DPA10103-DPB12301 DPA10103-DPB13101 DPA10103-DPB13401 DPA10103-DPB13901 DPA10103-DPB14001 DPA10103-DPB14101 DPA10103-DPB14801 DPA10103-DPB15001 DPA10103-DPB15901 DPA10104-DPB10101 DPA10104-DPB11501 DPA10105-DPB10101 DPA10105-DPB10401 DPA10105-DPB15001 DPA10106-DPB10101 DPA10201-DPB10101 DPA10201-DPB110601 DPA10201-DPB11501 DPA10201-DPB11601 DPA10201-DPB11901 DPA10202-DPB10101 DPA10202-DPB10201 DPA10202-DPB10202 DPA10202-DPB10401 DPA10202-DPB110601 DPA10202-DPB11901 DPA10202-DPB13101 DPA10202-DPB16501 DPA10301-DPB10101 DPA10301-DPB10201 DPA10301-DPB10202 DPA10301-DPB10401 DPA10301-DPB10402 DPA10301-DPB110501 DPA10301-DPB110601 DPA10301-DPB11801 DPA10301-DPB12301 DPA10301-DPB13901 DPA10301-DPB14001 DPA10301-DPB14901 DPA10301-DPB16501 DPA10301-DPB17501 DPA10301-DPB18001 DPA10401-DPB10101 DPA10401-DPB10201 DPA10401-DPB10202; note = HLAs: DPA10401-DPB10402 DPA10401-DPB10501 DPA10401-DPB110501 DPA10401-DPB14901
PPLLWLGFELMPDK

SEQ ID NO: 6890 - protein, 14 aa, synthetic construct
  source 1..14: note = Seed: PPFLWMGYELHPDK; note = HLAs: DRB1_1001 DPA10103-DPB10101 DPA10103-DPB10201 DPA10103-DPB10202 DPA10103-DPB10401 DPA10103-DPB112601 DPA10103-DPB11501 DPA10103-DPB11601 DPA10103-DPB11901 DPA10103-DPB12301 DPA10103-DPB13101 DPA10103-DPB13401 DPA10103-DPB13901 DPA10103-DPB14001 DPA10103-DPB14101 DPA10103-DPB14801 DPA10103-DPB15001 DPA10103-DPB15901 DPA10104-DPB10101 DPA10104-DPB11501 DPA10105-DPB10101 DPA10105-DPB10401 DPA10105-DPB15001 DPA10106-DPB10101 DPA10201-DPB10101 DPA10201-DPB110601 DPA10201-DPB11501 DPA10201-DPB11601 DPA10201-DPB11901 DPA10202-DPB10101 DPA10202-DPB10201 DPA10202-DPB10202 DPA10202-DPB10401 DPA10202-DPB110601 DPA10202-DPB11901 DPA10202-DPB13101 DPA10202-DPB16501 DPA10301-DPB10101 DPA10301-DPB10201 DPA10301-DPB10202 DPA10301-DPB10401 DPA10301-DPB10402 DPA10301-DPB110501 DPA10301-DPB110601 DPA10301-DPB11801 DPA10301-DPB12301 DPA10301-DPB13901 DPA10301-DPB14001 DPA10301-DPB14901 DPA10301-DPB15501 DPA10301-DPB16501 DPA10301-DPB17501 DPA10301-DPB18001 DPA10401-DPB10101 DPA10401-DPB10201; note = HLAs: DPA10401-DPB10202 DPA10401-DPB10402 DPA10401-DPB10501 DPA10401-DPB110501 DPA10401-DPB14901
PPFLWSGIELFPDK

SEQ ID NO: 6891 - protein, 14 aa, synthetic construct
  source 1..14: note = Seed: PPFLWMGYELHPDK; note = HLAs: DPA10103-DPB10101 DPA10103-DPB10201 DPA10103-DPB10202 DPA10103-DPB10401 DPA10103-DPB112601 DPA10103-DPB11501 DPA10103-DPB11601 DPA10103-DPB11901 DPA10103-DPB12301 DPA10103-DPB13101 DPA10103-DPB13401 DPA10103-DPB13901 DPA10103-DPB14001 DPA10103-DPB14101 DPA10103-DPB14801 DPA10103-DPB15001 DPA10103-DPB15901 DPA10104-DPB10101 DPA10104-DPB11501 DPA10105-DPB10101 DPA10105-DPB10401 DPA10105-DPB15001 DPA10106-DPB10101 DPA10201-DPB10101 DPA10201-DPB110601 DPA10201-DPB11501 DPA10201-DPB11601 DPA10201-DPB11901 DPA10202-DPB10101 DPA10202-DPB10201 DPA10202-DPB10202 DPA10202-DPB10401 DPA10202-DPB110601 DPA10202-DPB11901 DPA10202-DPB13101 DPA10202-DPB16501 DPA10301-DPB10101 DPA10301-DPB10201 DPA10301-DPB10202 DPA10301-DPB10401 DPA10301-DPB10402 DPA10301-DPB110501 DPA10301-DPB110601 DPA10301-DPB11801 DPA10301-DPB12301 DPA10301-DPB13901 DPA10301-DPB14001 DPA10301-DPB14901 DPA10301-DPB15501 DPA10301-DPB16501 DPA10301-DPB17501 DPA10301-DPB18001 DPA10401-DPB10101 DPA10401-DPB10201; note = HLAs: DPA10401-DPB10202 DPA10401-DPB10402 DPA10401-DPB10501 DPA10401-DPB110501 DPA10401-DPB14901
PPYLWDGFELLPDK

SEQ ID NO: 6892 - protein, 20 aa, synthetic construct
  source 1..20: note = Seed: KEPPFLWMGYELHPDKWTVQ; note = HLAs: DPA10103-DPB10101 DPA10103-DPB10201 DPA10103-DPB10202 DPA10103-DPB10401 DPA10103-DPB10402 DPA10103-DPB10501 DPA10103-DPB110501 DPA10103-DPB112601 DPA10103-DPB11501 DPA10103-DPB11601 DPA10103-DPB11801 DPA10103-DPB11901 DPA10103-DPB12301 DPA10103-DPB13101 DPA10103-DPB13401 DPA10103-DPB13901 DPA10103-DPB14001 DPA10103-DPB14101 DPA10103-DPB14801 DPA10103-DPB14901 DPA10103-DPB15001 DPA10103-DPB15101 DPA10103-DPB15501 DPA10103-DPB15901 DPA10103-DPB18001 DPA10104-DPB10101 DPA10104-DPB11501 DPA10105-DPB10101 DPA10105-DPB10401 DPA10105-DPB11801 DPA10105-DPB15001 DPA10106-DPB10101 DPA10201-DPB10101 DPA10201-DPB10201 DPA10201-DPB10202 DPA10201-DPB10401 DPA10201-DPB10501 DPA10201-DPB110601 DPA10201-DPB11501 DPA10201-DPB11601 DPA10201-DPB11901 DPA10201-DPB13401 DPA10201-DPB15501 DPA10202-DPB10101 DPA10202-DPB10201 DPA10202-DPB10202 DPA10202-DPB10401 DPA10202-DPB10501 DPA10202-DPB110601 DPA10202-DPB11101 DPA10202-DPB11301 DPA10202-DPB11801 DPA10202-DPB11901 DPA10202-DPB13101 DPA10202-DPB13801; note = HLAs: DPA10202-DPB15501 DPA10202-DPB16501 DPA10301-DPB10101 DPA10301-DPB10201 DPA10301-DPB10202 DPA10301-DPB10401 DPA10301-DPB10402 DPA10301-DPB110501 DPA10301-DPB110601 DPA10301-DPB11101 DPA10301-DPB11301 DPA10301-DPB11801 DPA10301-DPB12301 DPA10301-DPB13901 DPA10301-DPB14001 DPA10301-DPB14901 DPA10301-DPB15501 DPA10301-DPB16501 DPA10301-DPB17501 DPA10301-DPB18001 DPA10401-DPB10101 DPA10401-DPB10201 DPA10401-DPB10202 DPA10401-DPB10402 DPA10401-DPB10501 DPA10401-DPB110501 DPA10401-DPB14901
KEPPFLWFGFELEPDKWTVQ

SEQ ID NO: 6893 - protein, 20 aa, synthetic construct
  source 1..20: note = Seed: KEPPFLWMGYELHPDKWTVQ; note = HLAs: DRB1_0101 DPA10103-DPB10101 DPA10103-DPB10201 DPA10103-DPB10202 DPA10103-DPB10401 DPA10103-DPB10402 DPA10103-DPB10501 DPA10103-DPB110501 DPA10103-DPB112601 DPA10103-DPB11501 DPA10103-DPB11601 DPA10103-DPB11801 DPA10103-DPB11901 DPA10103-DPB12301 DPA10103-DPB13101 DPA10103-DPB13401 DPA10103-DPB13901 DPA10103-DPB14001 DPA10103-DPB14101 DPA10103-DPB14801 DPA10103-DPB14901 DPA10103-DPB15001 DPA10103-DPB15101 DPA10103-DPB15501 DPA10103-DPB15901 DPA10103-DPB18001 DPA10104-DPB10101 DPA10104-DPB11501 DPA10105-DPB10101 DPA10105-DPB10401 DPA10105-DPB11801 DPA10105-DPB15001 DPA10106-DPB10101 DPA10201-DPB10101 DPA10201-DPB10201 DPA10201-DPB10202 DPA10201-DPB10401 DPA10201-DPB10501 DPA10201-DPB110601 DPA10201-DPB11501 DPA10201-DPB11601 DPA10201-DPB11901 DPA10201-DPB13401 DPA10201-DPB15501 DPA10202-DPB10101 DPA10202-DPB10201 DPA10202-DPB10202 DPA10202-DPB10401 DPA10202-DPB10501 DPA10202-DPB110601 DPA10202-DPB11101 DPA10202-DPB11301 DPA10202-DPB11801 DPA10202-DPB11901 DPA10202-DPB13101; note = HLAs: DPA10202-DPB13801 DPA10202-DPB15501 DPA10202-DPB16501 DPA10301-DPB10101 DPA10301-DPB10201 DPA10301-DPB10202 DPA10301-DPB10401 DPA10301-DPB10402 DPA10301-DPB110501 DPA10301-DPB110601 DPA10301-DPB11101 DPA10301-DPB11301 DPA10301-DPB11801 DPA10301-DPB12301 DPA10301-DPB13901 DPA10301-DPB14001 DPA10301-DPB14901 DPA10301-DPB15501 DPA10301-DPB16501 DPA10301-DPB17501 DPA10301-DPB18001 DPA10401-DPB10101 DPA10401-DPB10201 DPA10401-DPB10202 DPA10401-DPB10402 DPA10401-DPB10501 DPA10401-DPB110501 DPA10401-DPB14901
KEPPFLWKGFELSPDKWTVQ

SEQ ID NO: 6894 - protein, 14 aa, synthetic construct
  source 1..14: note = Seed: PPFLWMGYELHPDK; note = HLAs: DPA10103-DPB10101 DPA10103-DPB10201 DPA10103-DPB10202 DPA10103-DPB10401 DPA10103-DPB112601 DPA10103-DPB11501 DPA10103-DPB11601 DPA10103-DPB11901 DPA10103-DPB12301 DPA10103-DPB13101 DPA10103-DPB13401 DPA10103-DPB13901 DPA10103-DPB14001 DPA10103-DPB14101 DPA10103-DPB14801 DPA10103-DPB15001 DPA10103-DPB15901 DPA10104-DPB10101 DPA10104-DPB11501 DPA10105-DPB10101 DPA10105-DPB10401 DPA10105-DPB15001 DPA10106-DPB10101 DPA10201-DPB10101 DPA10201-DPB110601 DPA10201-DPB11501 DPA10201-DPB11601 DPA10201-DPB11901 DPA10202-DPB10101 DPA10202-DPB10201 DPA10202-DPB10202 DPA10202-DPB10401 DPA10202-DPB110601 DPA10202-DPB11901 DPA10202-DPB13101 DPA10202-DPB16501 DPA10301-DPB10101 DPA10301-DPB10201 DPA10301-DPB10202 DPA10301-DPB10401 DPA10301-DPB10402 DPA10301-DPB110501 DPA10301-DPB110601 DPA10301-DPB11801 DPA10301-DPB12301 DPA10301-DPB13901 DPA10301-DPB14001 DPA10301-DPB14901 DPA10301-DPB15501 DPA10301-DPB16501 DPA10301-DPB17501 DPA10301-DPB18001 DPA10401-DPB10101 DPA10401-DPB10201; note = HLAs: DPA10401-DPB10202 DPA10401-DPB10402 DPA10401-DPB10501 DPA10401-DPB110501 DPA10401-DPB14901
PPFLWEGMELLPDK

SEQ ID NO: 6895 - protein, 14 aa, synthetic construct
  source 1..14: note = Seed: PPFLWMGYELHPDK; note = HLAs: DRB1_1001 DPA10103-DPB10101 DPA10103-DPB10201 DPA10103-DPB10202 DPA10103-DPB10401 DPA10103-DPB112601 DPA10103-DPB11501 DPA10103-DPB11601 DPA10103-DPB11901 DPA10103-DPB12301 DPA10103-DPB13101 DPA10103-DPB13401 DPA10103-DPB13901 DPA10103-DPB14001 DPA10103-DPB14101 DPA10103-DPB14801 DPA10103-DPB15001 DPA10103-DPB15901 DPA10104-DPB10101 DPA10104-DPB11501 DPA10105-DPB10101 DPA10105-DPB10401 DPA10105-DPB15001 DPA10106-DPB10101 DPA10201-DPB10101 DPA10201-DPB110601 DPA10201-DPB11501 DPA10201-DPB11601 DPA10201-DPB11901 DPA10202-DPB10101 DPA10202-DPB10201 DPA10202-DPB10202 DPA10202-DPB10401 DPA10202-DPB110601 DPA10202-DPB11901 DPA10202-DPB13101 DPA10202-DPB16501 DPA10301-DPB10101 DPA10301-DPB10201 DPA10301-DPB10202 DPA10301-DPB10401 DPA10301-DPB10402 DPA10301-DPB110501 DPA10301-DPB110601 DPA10301-DPB11801 DPA10301-DPB12301 DPA10301-DPB13901 DPA10301-DPB14001 DPA10301-DPB14901 DPA10301-DPB15501 DPA10301-DPB16501 DPA10301-DPB17501 DPA10301-DPB18001 DPA10401-DPB10101 DPA10401-DPB10201; note = HLAs: DPA10401-DPB10202 DPA10401-DPB10402 DPA10401-DPB10501 DPA10401-DPB110501 DPA10401-DPB14901
PPFLWMGYELMPDK

SEQ ID NO: 6896 - protein, 20 aa, synthetic construct
  source 1..20: note = Seed: KEPPFLWMGYELHPDKWTVQ; note = HLAs: DRB1_0101 DRB1_1001 DPA10103-DPB10101 DPA10103-DPB10201 DPA10103-DPB10202 DPA10103-DPB10401 DPA10103-DPB10402 DPA10103-DPB10501 DPA10103-DPB110501 DPA10103-DPB112601 DPA10103-DPB11501 DPA10103-DPB11601 DPA10103-DPB11801 DPA10103-DPB11901 DPA10103-DPB12301 DPA10103-DPB13101 DPA10103-DPB13401 DPA10103-DPB13901 DPA10103-DPB14001 DPA10103-DPB14101 DPA10103-DPB14801 DPA10103-DPB14901 DPA10103-DPB15001 DPA10103-DPB15101 DPA10103-DPB15501 DPA10103-DPB15901 DPA10103-DPB18001 DPA10104-DPB10101 DPA10104-DPB11501 DPA10105-DPB10101 DPA10105-DPB10401 DPA10105-DPB11801 DPA10105-DPB15001 DPA10106-DPB10101 DPA10201-DPB10101 DPA10201-DPB10201 DPA10201-DPB10202 DPA10201-DPB10401 DPA10201-DPB10501 DPA10201-DPB110601 DPA10201-DPB11501 DPA10201-DPB11601 DPA10201-DPB11901 DPA10201-DPB13401 DPA10201-DPB15501 DPA10202-DPB10101 DPA10202-DPB10201 DPA10202-DPB10202 DPA10202-DPB10401 DPA10202-DPB10501 DPA10202-DPB110601 DPA10202-DPB11101 DPA10202-DPB11301 DPA10202-DPB11801 DPA10202-DPB11901; note = HLAs: DPA10202-DPB13101 DPA10202-DPB13801 DPA10202-DPB15501 DPA10202-DPB16501 DPA10301-DPB10101 DPA10301-DPB10201 DPA10301-DPB10202 DPA10301-DPB10401 DPA10301-DPB10402 DPA10301-DPB110501 DPA10301-DPB110601 DPA10301-DPB11101 DPA10301-DPB11301 DPA10301-DPB11801 DPA10301-DPB12301 DPA10301-DPB13901 DPA10301-DPB14001 DPA10301-DPB14901 DPA10301-DPB15501 DPA10301-DPB16501 DPA10301-DPB17501 DPA10301-DPB18001 DPA10401-DPB10101 DPA10401-DPB10201 DPA10401-DPB10202 DPA10401-DPB10402 DPA10401-DPB10501 DPA10401-DPB110501 DPA10401-DPB14901
KEPPYLWIGFELNPDKWTVQ

SEQ ID NO: 6897 - protein, 20 aa, synthetic construct
  source 1..20: note = Seed: KEPPFLWMGYELHPDKWTVQ; note = HLAs: DRB1_0101 DRB1_1001 DPA10103-DPB10101 DPA10103-DPB10201 DPA10103-DPB10202 DPA10103-DPB10401 DPA10103-DPB10402 DPA10103-DPB10501 DPA10103-DPB110501 DPA10103-DPB112601 DPA10103-DPB11501 DPA10103-DPB11601 DPA10103-DPB11801 DPA10103-DPB11901 DPA10103-DPB12301 DPA10103-DPB13101 DPA10103-DPB13401 DPA10103-DPB13901 DPA10103-DPB14001 DPA10103-DPB14101 DPA10103-DPB14801 DPA10103-DPB14901 DPA10103-DPB15001 DPA10103-DPB15101 DPA10103-DPB15501 DPA10103-DPB15901 DPA10103-DPB18001 DPA10104-DPB10101 DPA10104-DPB11501 DPA10105-DPB10101 DPA10105-DPB10401 DPA10105-DPB11801 DPA10105-DPB15001 DPA10106-DPB10101 DPA10201-DPB10101 DPA10201-DPB10201 DPA10201-DPB10202 DPA10201-DPB10401 DPA10201-DPB10501 DPA10201-DPB110601 DPA10201-DPB11501 DPA10201-DPB11601 DPA10201-DPB11901 DPA10201-DPB13401 DPA10201-DPB15501 DPA10202-DPB10101 DPA10202-DPB10201 DPA10202-DPB10202 DPA10202-DPB10401 DPA10202-DPB10501 DPA10202-DPB110601 DPA10202-DPB11301 DPA10202-DPB11801 DPA10202-DPB11901 DPA10202-DPB13101; note = HLAs: DPA10202-DPB13801 DPA10202-DPB15501 DPA10202-DPB16501 DPA10301-DPB10101 DPA10301-DPB10201 DPA10301-DPB10202 DPA10301-DPB10401 DPA10301-DPB10402 DPA10301-DPB110501 DPA10301-DPB110601 DPA10301-DPB11101 DPA10301-DPB11301 DPA10301-DPB11801 DPA10301-DPB12301 DPA10301-DPB13901 DPA10301-DPB14001 DPA10301-DPB14901 DPA10301-DPB15501 DPA10301-DPB16501 DPA10301-DPB17501 DPA10301-DPB18001 DPA10401-DPB10101 DPA10401-DPB10201 DPA10401-DPB10202 DPA10401-DPB10402 DPA10401-DPB10501 DPA10401-DPB110501 DPA10401-DPB14901
KEPPFLWTGLELAPDKWTVQ

SEQ ID NO: 6898 - protein, 14 aa, synthetic construct
  source 1..14: note = Seed: PPFLWMGYELHPDK; note = HLAs: DRB1_1001 DPA10103-DPB10201 DPA10103-DPB10202 DPA10103-DPB11501 DPA10103-DPB13401 DPA10103-DPB14001 DPA10103-DPB14101 DPA10103-DPB14801 DPA10103-DPB15901 DPA10104-DPB11501 DPA10201-DPB110601 DPA10201-DPB11501 DPA10201-DPB11601 DPA10201-DPB11901 DPA10202-DPB10101 DPA10202-DPB10201 DPA10202-DPB10202 DPA10202-DPB110601 DPA10202-DPB11901 DPA10202-DPB16501 DPA10301-DPB10201 DPA10301-DPB10202 DPA10301-DPB10401 DPA10301-DPB10402 DPA10301-DPB110501 DPA10301-DPB110601 DPA10301-DPB11801 DPA10301-DPB12301 DPA10301-DPB13901 DPA10301-DPB14001 DPA10301-DPB14901 DPA10301-DPB15501 DPA10301-DPB17501 DPA10301-DPB18001 DPA10401-DPB10201 DPA10401-DPB10202 DPA10401-DPB10402 DPA10401-DPB110501 DPA10401-DPB14901
PPFLWVGVELLPDK

SEQ ID NO: 6899 - protein, 20 aa, synthetic construct
  source 1..20: note = Seed: KEPPFLWMGYELHPDKWTVQ; note = HLAs: DPA10103-DPB10101 DPA10103-DPB10201 DPA10103-DPB10202 DPA10103-DPB10401 DPA10103-DPB10402 DPA10103-DPB10501 DPA10103-DPB110501 DPA10103-DPB112601 DPA10103-DPB11501 DPA10103-DPB11601 DPA10103-DPB11801 DPA10103-DPB11901 DPA10103-DPB12301 DPA10103-DPB13101 DPA10103-DPB13401 DPA10103-DPB13901 DPA10103-DPB14001 DPA10103-DPB14101 DPA10103-DPB14801 DPA10103-DPB14901 DPA10103-DPB15001 DPA10103-DPB15101 DPA10103-DPB15501 DPA10103-DPB15901 DPA10103-DPB18001 DPA10104-DPB10101 DPA10104-DPB11501 DPA10105-DPB10101 DPA10105-DPB10401 DPA10105-DPB11801 DPA10105-DPB15001 DPA10106-DPB10101 DPA10201-DPB10101 DPA10201-DPB10201 DPA10201-DPB10202 DPA10201-DPB10401 DPA10201-DPB10501 DPA10201-DPB110601 DPA10201-DPB11501 DPA10201-DPB11601 DPA10201-DPB11901 DPA10201-DPB13401 DPA10201-DPB15501 DPA10202-DPB10101 DPA10202-DPB10201 DPA10202-DPB10202 DPA10202-DPB10401 DPA10202-DPB10501 DPA10202-DPB110601 DPA10202-DPB11101 DPA10202-DPB11301 DPA10202-DPB11801 DPA10202-DPB11901 DPA10202-DPB13101 DPA10202-DPB13801; note = HLAs: DPA10202-DPB15501 DPA10202-DPB16501 DPA10301-DPB10101 DPA10301-DPB10201 DPA10301-DPB10202 DPA10301-DPB10401 DPA10301-DPB10402 DPA10301-DPB110501 DPA10301-DPB110601 DPA10301-DPB11101 DPA10301-DPB11301 DPA10301-DPB11801 DPA10301-DPB12301 DPA10301-DPB13901 DPA10301-DPB14001 DPA10301-DPB14901 DPA10301-DPB15501 DPA10301-DPB16501 DPA10301-DPB17501 DPA10301-DPB18001 DPA10401-DPB10101 DPA10401-DPB10201 DPA10401-DPB10202 DPA10401-DPB10402 DPA10401-DPB10501 DPA10401-DPB110501 DPA10401-DPB14901
KEPPMLWQGFELIPDKWTVQ

SEQ ID NO: 6900 - protein, 14 aa, synthetic construct
  source 1..14: note = Seed: PPFLWMGYELHPDK; note = HLAs: DPA10103-DPB10101 DPA10103-DPB10201 DPA10103-DPB10202 DPA10103-DPB10401 DPA10103-DPB112601 DPA10103-DPB11501 DPA10103-DPB11601 DPA10103-DPB11901 DPA10103-DPB12301 DPA10103-DPB13101 DPA10103-DPB13401 DPA10103-DPB13901 DPA10103-DPB14001 DPA10103-DPB14101 DPA10103-DPB14801 DPA10103-DPB15001 DPA10103-DPB15901 DPA10104-DPB10101 DPA10104-DPB11501 DPA10105-DPB10101 DPA10105-DPB10401 DPA10105-DPB15001 DPA10106-DPB10101 DPA10201-DPB10101 DPA10201-DPB110601 DPA10201-DPB11501 DPA10201-DPB11601 DPA10201-DPB11901 DPA10202-DPB10101 DPA10202-DPB10201 DPA10202-DPB10202 DPA10202-DPB10401 DPA10202-DPB110601 DPA10202-DPB11901 DPA10202-DPB13101 DPA10202-DPB16501 DPA10301-DPB10101 DPA10301-DPB10201 DPA10301-DPB10202 DPA10301-DPB10401 DPA10301-DPB10402 DPA10301-DPB110501 DPA10301-DPB110601 DPA10301-DPB11801 DPA10301-DPB12301 DPA10301-DPB13901 DPA10301-DPB14001 DPA10301-DPB14901 DPA10301-DPB15501 DPA10301-DPB16501 DPA10301-DPB17501 DPA10301-DPB18001 DPA10401-DPB10101 DPA10401-DPB10201; note = HLAs: DPA10401-DPB10202 DPA10401-DPB10402 DPA10401-DPB10501 DPA10401-DPB110501 DPA10401-DPB14901
PPYLWHGFELAPDK

SEQ ID NO: 6901 - protein, 14 aa, synthetic construct
  source 1..14: note = Seed: PPFLWMGYELHPDK; note = HLAs: DPA10103-DPB10101 DPA10103-DPB10201 DPA10103-DPB10202 DPA10103-DPB10401 DPA10103-DPB112601 DPA10103-DPB11501 DPA10103-DPB11601 DPA10103-DPB11901 DPA10103-DPB12301 DPA10103-DPB13101 DPA10103-DPB13401 DPA10103-DPB13901 DPA10103-DPB14001 DPA10103-DPB14101 DPA10103-DPB14801 DPA10103-DPB15001 DPA10103-DPB15901 DPA10104-DPB10101 DPA10104-DPB11501 DPA10105-DPB10101 DPA10105-DPB10401 DPA10105-DPB15001 DPA10106-DPB10101 DPA10201-DPB10101 DPA10201-DPB110601 DPA10201-DPB11501 DPA10201-DPB11601 DPA10201-DPB11901 DPA10202-DPB10101 DPA10202-DPB10201 DPA10202-DPB10202 DPA10202-DPB10401 DPA10202-DPB110601 DPA10202-DPB11901 DPA10202-DPB13101 DPA10202-DPB16501 DPA10301-DPB10101 DPA10301-DPB10201 DPA10301-DPB10202 DPA10301-DPB10401 DPA10301-DPB10402 DPA10301-DPB110501 DPA10301-DPB110601 DPA10301-DPB11801 DPA10301-DPB12301 DPA10301-DPB13901 DPA10301-DPB14001 DPA10301-DPB14901 DPA10301-DPB15501 DPA10301-DPB16501 DPA10301-DPB17501 DPA10301-DPB18001 DPA10401-DPB10101 DPA10401-DPB10201; note = HLAs: DPA10401-DPB10202 DPA10401-DPB10402 DPA10401-DPB10501 DPA10401-DPB110501 DPA10401-DPB14901
PPFLWHGWELFPDK

SEQ ID NO: 6902 - protein, 14 aa, synthetic construct
  source 1..14: note = Seed: PPFLWMGYELHPDK; note = HLAs: DPA10103-DPB10101 DPA10103-DPB10201 DPA10103-DPB10202 DPA10103-DPB10401 DPA10103-DPB112601 DPA10103-DPB11501 DPA10103-DPB11601 DPA10103-DPB11901 DPA10103-DPB12301 DPA10103-DPB13101 DPA10103-DPB13401 DPA10103-DPB13901 DPA10103-DPB14001 DPA10103-DPB14101 DPA10103-DPB14801 DPA10103-DPB15001 DPA10103-DPB15901 DPA10104-DPB10101 DPA10104-DPB11501 DPA10105-DPB10101 DPA10105-DPB10401 DPA10105-DPB15001 DPA10106-DPB10101 DPA10201-DPB10101 DPA10201-DPB110601 DPA10201-DPB11501 DPA10201-DPB11601 DPA10201-DPB11901 DPA10202-DPB10101 DPA10202-DPB10201 DPA10202-DPB10202 DPA10202-DPB10401 DPA10202-DPB110601 DPA10202-DPB11901 DPA10202-DPB13101 DPA10202-DPB16501 DPA10301-DPB10101 DPA10301-DPB10201 DPA10301-DPB10202 DPA10301-DPB10401 DPA10301-DPB10402 DPA10301-DPB110501 DPA10301-DPB110601 DPA10301-DPB11801 DPA10301-DPB12301 DPA10301-DPB13901 DPA10301-DPB14001 DPA10301-DPB14901 DPA10301-DPB16501 DPA10301-DPB17501 DPA10301-DPB18001 DPA10401-DPB10101 DPA10401-DPB10201 DPA10401-DPB10202; note = HLAs: DPA10401-DPB10402 DPA10401-DPB10501 DPA10401-DPB110501 DPA10401-DPB14901
PPVLWNGFELLPDK

SEQ ID NO: 6903 - protein, 14 aa, synthetic construct
  source 1..14: note = Seed: PPFLWMGYELHPDK; note = HLAs: DRB1_1001 DPA10103-DPB10101 DPA10103-DPB10201 DPA10103-DPB10202 DPA10103-DPB10401 DPA10103-DPB112601 DPA10103-DPB11501 DPA10103-DPB11601 DPA10103-DPB11901 DPA10103-DPB12301 DPA10103-DPB13101 DPA10103-DPB13401 DPA10103-DPB13901 DPA10103-DPB14001 DPA10103-DPB14101 DPA10103-DPB14801 DPA10103-DPB15001 DPA10103-DPB15901 DPA10104-DPB10101 DPA10104-DPB11501 DPA10105-DPB10101 DPA10105-DPB10401 DPA10105-DPB15001 DPA10106-DPB10101 DPA10201-DPB10101 DPA10201-DPB110601 DPA10201-DPB11501 DPA10201-DPB11601 DPA10201-DPB11901 DPA10202-DPB10101 DPA10202-DPB10201 DPA10202-DPB10202 DPA10202-DPB10401 DPA10202-DPB110601 DPA10202-DPB11901 DPA10202-DPB13101 DPA10202-DPB16501 DPA10301-DPB10101 DPA10301-DPB10201 DPA10301-DPB10202 DPA10301-DPB10401 DPA10301-DPB10402 DPA10301-DPB110501 DPA10301-DPB110601 DPA10301-DPB11801 DPA10301-DPB12301 DPA10301-DPB13901 DPA10301-DPB14001 DPA10301-DPB14901 DPA10301-DPB15501 DPA10301-DPB16501 DPA10301-DPB17501 DPA10301-DPB18001 DPA10401-DPB10101 DPA10401-DPB10201; note = HLAs: DPA10401-DPB10202 DPA10401-DPB10402 DPA10401-DPB10501 DPA10401-DPB110501 DPA10401-DPB14901
PPWLWMGFELIPDK

SEQ ID NO: 6904 - protein, 20 aa, synthetic construct
  source 1..20: note = Seed: KEPPFLWMGYELHPDKWTVQ; note = HLAs: DRB1_0101 DRB1_1001 DPA10103-DPB10101 DPA10103-DPB10201 DPA10103-DPB10202 DPA10103-DPB10401 DPA10103-DPB10402 DPA10103-DPB10501 DPA10103-DPB110501 DPA10103-DPB112601 DPA10103-DPB11501 DPA10103-DPB11601 DPA10103-DPB11801 DPA10103-DPB11901 DPA10103-DPB12301 DPA10103-DPB13101 DPA10103-DPB13401 DPA10103-DPB13901 DPA10103-DPB14001 DPA10103-DPB14101 DPA10103-DPB14801 DPA10103-DPB14901 DPA10103-DPB15001 DPA10103-DPB15101 DPA10103-DPB15501 DPA10103-DPB15901 DPA10103-DPB18001 DPA10104-DPB10101 DPA10104-DPB11501 DPA10105-DPB10101 DPA10105-DPB10401 DPA10105-DPB11801 DPA10105-DPB15001 DPA10106-DPB10101 DPA10201-DPB10101 DPA10201-DPB10201 DPA10201-DPB10202 DPA10201-DPB10401 DPA10201-DPB10501 DPA10201-DPB110601 DPA10201-DPB11501 DPA10201-DPB11601 DPA10201-DPB11901 DPA10201-DPB13401 DPA10201-DPB15501 DPA10202-DPB10101 DPA10202-DPB10201 DPA10202-DPB10202 DPA10202-DPB10401 DPA10202-DPB10501 DPA10202-DPB110601 DPA10202-DPB11101 DPA10202-DPB11801 DPA10202-DPB11901 DPA10202-DPB13101; note = HLAs: DPA10202-DPB13801 DPA10202-DPB15501 DPA10202-DPB16501 DPA10301-DPB10101 DPA10301-DPB10201 DPA10301-DPB10202 DPA10301-DPB10401 DPA10301-DPB10402 DPA10301-DPB110501 DPA10301-DPB110601 DPA10301-DPB11101 DPA10301-DPB11301 DPA10301-DPB11801 DPA10301-DPB12301 DPA10301-DPB13901 DPA10301-DPB14001 DPA10301-DPB14901 DPA10301-DPB15501 DPA10301-DPB16501 DPA10301-DPB17501 DPA10301-DPB18001 DPA10401-DPB10101 DPA10401-DPB10201 DPA10401-DPB10202 DPA10401-DPB10402 DPA10401-DPB10501 DPA10401-DPB110501 DPA10401-DPB14901
KEPPFLWSGIELFPDKWTVQ

SEQ ID NO: 6905 - protein, 20 aa, synthetic construct
  source 1..20: note = Seed: KEPPFLWMGYELHPDKWTVQ; note = HLAs: DRB1_0101 DPA10103-DPB10101 DPA10103-DPB10201 DPA10103-DPB10202 DPA10103-DPB10401 DPA10103-DPB10402 DPA10103-DPB10501 DPA10103-DPB110501 DPA10103-DPB112601 DPA10103-DPB11501 DPA10103-DPB11601 DPA10103-DPB11801 DPA10103-DPB11901 DPA10103-DPB12301 DPA10103-DPB13101 DPA10103-DPB13401 DPA10103-DPB13901 DPA10103-DPB14001 DPA10103-DPB14101 DPA10103-DPB14801 DPA10103-DPB14901 DPA10103-DPB15001 DPA10103-DPB15101 DPA10103-DPB15501 DPA10103-DPB15901 DPA10103-DPB18001 DPA10104-DPB10101 DPA10104-DPB11501 DPA10105-DPB10101 DPA10105-DPB10401 DPA10105-DPB11801 DPA10105-DPB15001 DPA10106-DPB10101 DPA10201-DPB10101 DPA10201-DPB10201 DPA10201-DPB10202 DPA10201-DPB10401 DPA10201-DPB10501 DPA10201-DPB110601 DPA10201-DPB11501 DPA10201-DPB11601 DPA10201-DPB11901 DPA10201-DPB13401 DPA10201-DPB15501 DPA10202-DPB10101 DPA10202-DPB10201 DPA10202-DPB10202 DPA10202-DPB10401 DPA10202-DPB10501 DPA10202-DPB110601 DPA10202-DPB11101 DPA10202-DPB11301 DPA10202-DPB11801 DPA10202-DPB11901 DPA10202-DPB13101; note = HLAs: DPA10202-DPB13801 DPA10202-DPB15501 DPA10202-DPB16501 DPA10301-DPB10101 DPA10301-DPB10201 DPA10301-DPB10202 DPA10301-DPB10401 DPA10301-DPB10402 DPA10301-DPB110501 DPA10301-DPB110601 DPA10301-DPB11101 DPA10301-DPB11301 DPA10301-DPB11801 DPA10301-DPB12301 DPA10301-DPB13901 DPA10301-DPB14001 DPA10301-DPB14901 DPA10301-DPB15501 DPA10301-DPB16501 DPA10301-DPB17501 DPA10301-DPB18001 DPA10401-DPB10101 DPA10401-DPB10201 DPA10401-DPB10202 DPA10401-DPB10402 DPA10401-DPB10501 DPA10401-DPB110501 DPA10401-DPB14901
KEPPYLWTGLELLPDKWTVQ

SEQ ID NO: 6906 - protein, 14 aa, synthetic construct
  source 1..14: note = Seed: PPFLWMGYELHPDK; note = HLAs: DPA10103-DPB10101 DPA10103-DPB10201 DPA10103-DPB10202 DPA10103-DPB10401 DPA10103-DPB112601 DPA10103-DPB11501 DPA10103-DPB11601 DPA10103-DPB11901 DPA10103-DPB12301 DPA10103-DPB13101 DPA10103-DPB13401 DPA10103-DPB13901 DPA10103-DPB14001 DPA10103-DPB14101 DPA10103-DPB14801 DPA10103-DPB15001 DPA10103-DPB15901 DPA10104-DPB10101 DPA10104-DPB11501 DPA10105-DPB10101 DPA10105-DPB10401 DPA10105-DPB15001 DPA10106-DPB10101 DPA10201-DPB10101 DPA10201-DPB110601 DPA10201-DPB11501 DPA10201-DPB11601 DPA10201-DPB11901 DPA10202-DPB10101 DPA10202-DPB10201 DPA10202-DPB10202 DPA10202-DPB10401 DPA10202-DPB110601 DPA10202-DPB11901 DPA10202-DPB13101 DPA10202-DPB16501 DPA10301-DPB10101 DPA10301-DPB10201 DPA10301-DPB10202 DPA10301-DPB10401 DPA10301-DPB10402 DPA10301-DPB110501 DPA10301-DPB110601 DPA10301-DPB11801 DPA10301-DPB12301 DPA10301-DPB13901 DPA10301-DPB14001 DPA10301-DPB14901 DPA10301-DPB15501 DPA10301-DPB16501 DPA10301-DPB17501 DPA10301-DPB18001 DPA10401-DPB10101 DPA10401-DPB10201; note = HLAs: DPA10401-DPB10202 DPA10401-DPB10402 DPA10401-DPB10501 DPA10401-DPB110501 DPA10401-DPB14901
PPFLWSGYELTPDK

SEQ ID NO: 6907 - protein, 14 aa, synthetic construct
  source 1..14: note = Seed: PPFLWMGYELHPDK; note = HLAs: DPA10103-DPB10101 DPA10103-DPB10201 DPA10103-DPB10202 DPA10103-DPB10401 DPA10103-DPB112601 DPA10103-DPB11501 DPA10103-DPB11601 DPA10103-DPB11901 DPA10103-DPB12301 DPA10103-DPB13101 DPA10103-DPB13401 DPA10103-DPB13901 DPA10103-DPB14001 DPA10103-DPB14101 DPA10103-DPB14801 DPA10103-DPB15001 DPA10103-DPB15901 DPA10104-DPB10101 DPA10104-DPB11501 DPA10105-DPB10101 DPA10105-DPB10401 DPA10105-DPB15001 DPA10106-DPB10101 DPA10201-DPB10101 DPA10201-DPB110601 DPA10201-DPB11501 DPA10201-DPB11601 DPA10201-DPB11901 DPA10202-DPB10101 DPA10202-DPB10201 DPA10202-DPB10202 DPA10202-DPB10401 DPA10202-DPB110601 DPA10202-DPB11901 DPA10202-DPB13101 DPA10202-DPB16501 DPA10301-DPB10101 DPA10301-DPB10201 DPA10301-DPB10202 DPA10301-DPB10401 DPA10301-DPB10402 DPA10301-DPB110501 DPA10301-DPB110601 DPA10301-DPB11801 DPA10301-DPB12301 DPA10301-DPB13901 DPA10301-DPB14001 DPA10301-DPB14901 DPA10301-DPB16501 DPA10301-DPB17501 DPA10301-DPB18001 DPA10401-DPB10101 DPA10401-DPB10201 DPA10401-DPB10202; note = HLAs: DPA10401-DPB10402 DPA10401-DPB10501 DPA10401-DPB110501 DPA10401-DPB14901
PPMLWAGFELFPDK

SEQ ID NO: 6908 - protein, 20 aa, synthetic construct
  source 1..20: note = Seed: KEPPFLWMGYELHPDKWTVQ; note = HLAs: DRB1_0101 DRB1_0405 DRB1_1001 DPA10103-DPB10101 DPA10103-DPB10201 DPA10103-DPB10202 DPA10103-DPB10401 DPA10103-DPB10402 DPA10103-DPB10501 DPA10103-DPB110501 DPA10103-DPB112601 DPA10103-DPB11501 DPA10103-DPB11601 DPA10103-DPB11801 DPA10103-DPB11901 DPA10103-DPB12301 DPA10103-DPB13101 DPA10103-DPB13401 DPA10103-DPB13901 DPA10103-DPB14001 DPA10103-DPB14101 DPA10103-DPB14801 DPA10103-DPB14901 DPA10103-DPB15001 DPA10103-DPB15101 DPA10103-DPB15501 DPA10103-DPB15901 DPA10103-DPB18001 DPA10104-DPB10101 DPA10104-DPB11501 DPA10105-DPB10101 DPA10105-DPB10401 DPA10105-DPB11801 DPA10105-DPB15001 DPA10106-DPB10101 DPA10201-DPB10101 DPA10201-DPB10201 DPA10201-DPB10202 DPA10201-DPB10401 DPA10201-DPB10501 DPA10201-DPB110601 DPA10201-DPB11501 DPA10201-DPB11601 DPA10201-DPB11901 DPA10201-DPB13401 DPA10201-DPB15501 DPA10202-DPB10101 DPA10202-DPB10201 DPA10202-DPB10202 DPA10202-DPB10401 DPA10202-DPB10501 DPA10202-DPB110601 DPA10202-DPB11101 DPA10202-DPB11301 DPA10202-DPB11801 DPA10202-DPB11901; note = HLAs: DPA10202-DPB13101 DPA10202-DPB13801 DPA10202-DPB15501 DPA10202-DPB16501 DPA10301-DPB10101 DPA10301-DPB10201 DPA10301-DPB10202 DPA10301-DPB10401 DPA10301-DPB10402 DPA10301-DPB110501 DPA10301-DPB110601 DPA10301-DPB11101 DPA10301-DPB11301 DPA10301-DPB11801 DPA10301-DPB12301 DPA10301-DPB13901 DPA10301-DPB14001 DPA10301-DPB14901 DPA10301-DPB15501 DPA10301-DPB16501 DPA10301-DPB17501 DPA10301-DPB18001 DPA10401-DPB10101 DPA10401-DPB10201 DPA10401-DPB10202 DPA10401-DPB10402 DPA10401-DPB10501 DPA10401-DPB110501 DPA10401-DPB14901
KEPPFLWSGVELLPDKWTVQ

SEQ ID NO: 6909 - protein, 20 aa, synthetic construct
  source 1..20: note = Seed: KEPPFLWMGYELHPDKWTVQ; note = HLAs: DRB1_0101 DRB1_0405 DRB1_1001 DPA10103-DPB10201 DPA10103-DPB10202 DPA10103-DPB10401 DPA10103-DPB10402 DPA10103-DPB10501 DPA10103-DPB110501 DPA10103-DPB112601 DPA10103-DPB11501 DPA10103-DPB11601 DPA10103-DPB11801 DPA10103-DPB11901 DPA10103-DPB12301 DPA10103-DPB13401 DPA10103-DPB13901 DPA10103-DPB14001 DPA10103-DPB14101 DPA10103-DPB14801 DPA10103-DPB14901 DPA10103-DPB15101 DPA10103-DPB15501 DPA10103-DPB15901 DPA10103-DPB18001 DPA10104-DPB11501 DPA10105-DPB10401 DPA10105-DPB11801 DPA10106-DPB10101 DPA10201-DPB10101 DPA10201-DPB10201 DPA10201-DPB10202 DPA10201-DPB10401 DPA10201-DPB10501 DPA10201-DPB110601 DPA10201-DPB11501 DPA10201-DPB11601 DPA10201-DPB11901 DPA10201-DPB13401 DPA10201-DPB15501 DPA10202-DPB10101 DPA10202-DPB10201 DPA10202-DPB10202 DPA10202-DPB10401 DPA10202-DPB10501 DPA10202-DPB110601 DPA10202-DPB11101 DPA10202-DPB11301 DPA10202-DPB11801 DPA10202-DPB11901 DPA10202-DPB13101 DPA10202-DPB13801 DPA10202-DPB15501 DPA10202-DPB16501 DPA10301-DPB10101 DPA10301-DPB10201; note = HLAs: DPA10301-DPB10202 DPA10301-DPB10401 DPA10301-DPB10402 DPA10301-DPB110501 DPA10301-DPB110601 DPA10301-DPB11101 DPA10301-DPB11301 DPA10301-DPB11801 DPA10301-DPB12301 DPA10301-DPB13901 DPA10301-DPB14001 DPA10301-DPB14901 DPA10301-DPB15501 DPA10301-DPB16501 DPA10301-DPB17501 DPA10301-DPB18001 DPA10401-DPB10201 DPA10401-DPB10202 DPA10401-DPB10402 DPA10401-DPB10501 DPA10401-DPB110501 DPA10401-DPB14901
KEPPFLWFGAELLPDKWTVQ

SEQ ID NO: 6910 - protein, 20 aa, synthetic construct
  source 1..20: note = Seed: KEPPFLWMGYELHPDKWTVQ; note = HLAs: DPA10103-DPB10101 DPA10103-DPB10201 DPA10103-DPB10202 DPA10103-DPB10401 DPA10103-DPB10402 DPA10103-DPB10501 DPA10103-DPB110501 DPA10103-DPB112601 DPA10103-DPB11501 DPA10103-DPB11601 DPA10103-DPB11801 DPA10103-DPB11901 DPA10103-DPB12301 DPA10103-DPB13101 DPA10103-DPB13401 DPA10103-DPB13901 DPA10103-DPB14001 DPA10103-DPB14101 DPA10103-DPB14801 DPA10103-DPB14901 DPA10103-DPB15001 DPA10103-DPB15101 DPA10103-DPB15501 DPA10103-DPB15901 DPA10103-DPB18001 DPA10104-DPB10101 DPA10104-DPB11501 DPA10105-DPB10101 DPA10105-DPB10401 DPA10105-DPB11801 DPA10105-DPB15001 DPA10106-DPB10101 DPA10201-DPB10101 DPA10201-DPB10201 DPA10201-DPB10202 DPA10201-DPB10401 DPA10201-DPB10501 DPA10201-DPB110601 DPA10201-DPB11501 DPA10201-DPB11601 DPA10201-DPB11901 DPA10201-DPB13401 DPA10201-DPB15501 DPA10202-DPB10101 DPA10202-DPB10201 DPA10202-DPB10202 DPA10202-DPB10401 DPA10202-DPB10501 DPA10202-DPB110601 DPA10202-DPB11101 DPA10202-DPB11301 DPA10202-DPB11801 DPA10202-DPB11901 DPA10202-DPB13101 DPA10202-DPB13801; note = HLAs: DPA10202-DPB15501 DPA10202-DPB16501 DPA10301-DPB10101 DPA10301-DPB10201 DPA10301-DPB10202 DPA10301-DPB10401 DPA10301-DPB10402 DPA10301-DPB110501 DPA10301-DPB110601 DPA10301-DPB11101 DPA10301-DPB11301 DPA10301-DPB11801 DPA10301-DPB12301 DPA10301-DPB13901 DPA10301-DPB14001 DPA10301-DPB14901 DPA10301-DPB15501 DPA10301-DPB16501 DPA10301-DPB17501 DPA10301-DPB18001 DPA10401-DPB10101 DPA10401-DPB10201 DPA10401-DPB10202 DPA10401-DPB10402 DPA10401-DPB10501 DPA10401-DPB110501 DPA10401-DPB14901
KEPPFLWSGFELKPDKWTVQ

SEQ ID NO: 6911 - protein, 20 aa, synthetic construct
  source 1..20: note = Seed: KEPPFLWMGYELHPDKWTVQ; note = HLAs: DRB1_0101 DRB1_0405 DRB1_1001 DPA10103-DPB10101 DPA10103-DPB10201 DPA10103-DPB10202 DPA10103-DPB10401 DPA10103-DPB10402 DPA10103-DPB10501 DPA10103-DPB110501 DPA10103-DPB112601 DPA10103-DPB11501 DPA10103-DPB11601 DPA10103-DPB11801 DPA10103-DPB11901 DPA10103-DPB12301 DPA10103-DPB13101 DPA10103-DPB13401 DPA10103-DPB13901 DPA10103-DPB14001 DPA10103-DPB14101 DPA10103-DPB14801 DPA10103-DPB14901 DPA10103-DPB15001 DPA10103-DPB15101 DPA10103-DPB15501 DPA10103-DPB15901 DPA10103-DPB18001 DPA10104-DPB10101 DPA10104-DPB11501 DPA10105-DPB10101 DPA10105-DPB10401 DPA10105-DPB11801 DPA10105-DPB15001 DPA10106-DPB10101 DPA10201-DPB10101 DPA10201-DPB10201 DPA10201-DPB10202 DPA10201-DPB10401 DPA10201-DPB10501 DPA10201-DPB110601 DPA10201-DPB11501 DPA10201-DPB11601 DPA10201-DPB11901 DPA10201-DPB13401 DPA10201-DPB15501 DPA10202-DPB10101 DPA10202-DPB10201 DPA10202-DPB10202 DPA10202-DPB10401 DPA10202-DPB10501 DPA10202-DPB110601 DPA10202-DPB11101 DPA10202-DPB11301 DPA10202-DPB11801 DPA10202-DPB11901; note = HLAs: DPA10202-DPB13101 DPA10202-DPB13801 DPA10202-DPB15501 DPA10202-DPB16501 DPA10301-DPB10101 DPA10301-DPB10201 DPA10301-DPB10202 DPA10301-DPB10401 DPA10301-DPB10402 DPA10301-DPB110501 DPA10301-DPB110601 DPA10301-DPB11101 DPA10301-DPB11301 DPA10301-DPB11801 DPA10301-DPB12301 DPA10301-DPB13901 DPA10301-DPB14001 DPA10301-DPB14901 DPA10301-DPB15501 DPA10301-DPB16501 DPA10301-DPB17501 DPA10301-DPB18001 DPA10401-DPB10101 DPA10401-DPB10201 DPA10401-DPB10202 DPA10401-DPB10402 DPA10401-DPB10501 DPA10401-DPB110501 DPA10401-DPB14901
KEPPFLWTGAELIPDKWTVQ

SEQ ID NO: 6912 - protein, 20 aa, synthetic construct
  source 1..20: note = Seed: KEPPFLWMGYELHPDKWTVQ; note = HLAs: DRB1_1001 DPA10103-DPB10101 DPA10103-DPB10201 DPA10103-DPB10202 DPA10103-DPB10401 DPA10103-DPB10402 DPA10103-DPB10501 DPA10103-DPB110501 DPA10103-DPB112601 DPA10103-DPB11501 DPA10103-DPB11601 DPA10103-DPB11801 DPA10103-DPB11901 DPA10103-DPB12301 DPA10103-DPB13101 DPA10103-DPB13401 DPA10103-DPB13901 DPA10103-DPB14001 DPA10103-DPB14101 DPA10103-DPB14801 DPA10103-DPB14901 DPA10103-DPB15001 DPA10103-DPB15101 DPA10103-DPB15501 DPA10103-DPB15901 DPA10103-DPB18001 DPA10104-DPB10101 DPA10104-DPB11501 DPA10105-DPB10101 DPA10105-DPB10401 DPA10105-DPB11801 DPA10105-DPB15001 DPA10106-DPB10101 DPA10201-DPB10101 DPA10201-DPB10201 DPA10201-DPB10202 DPA10201-DPB10401 DPA10201-DPB10501 DPA10201-DPB110601 DPA10201-DPB11501 DPA10201-DPB11601 DPA10201-DPB11901 DPA10201-DPB13401 DPA10201-DPB15501 DPA10202-DPB10101 DPA10202-DPB10201 DPA10202-DPB10202 DPA10202-DPB10401 DPA10202-DPB10501 DPA10202-DPB110601 DPA10202-DPB11101 DPA10202-DPB11301 DPA10202-DPB11801 DPA10202-DPB11901 DPA10202-DPB13101; note = HLAs: DPA10202-DPB13801 DPA10202-DPB15501 DPA10202-DPB16501 DPA10301-DPB10101 DPA10301-DPB10201 DPA10301-DPB10202 DPA10301-DPB10401 DPA10301-DPB10402 DPA10301-DPB110501 DPA10301-DPB110601 DPA10301-DPB11101 DPA10301-DPB11301 DPA10301-DPB11801 DPA10301-DPB12301 DPA10301-DPB13901 DPA10301-DPB14001 DPA10301-DPB14901 DPA10301-DPB15501 DPA10301-DPB16501 DPA10301-DPB17501 DPA10301-DPB18001 DPA10401-DPB10101 DPA10401-DPB10201 DPA10401-DPB10202 DPA10401-DPB10402 DPA10401-DPB10501 DPA10401-DPB110501 DPA10401-DPB14901
KEPPYLWDGFELVPDKWTVQ

SEQ ID NO: 6913 - protein, 20 aa, synthetic construct
  source 1..20: note = Seed: KEPPFLWMGYELHPDKWTVQ; note = HLAs: DPA10103-DPB10101 DPA10103-DPB10201 DPA10103-DPB10202 DPA10103-DPB10401 DPA10103-DPB10402 DPA10103-DPB10501 DPA10103-DPB110501 DPA10103-DPB112601 DPA10103-DPB11501 DPA10103-DPB11601 DPA10103-DPB11801 DPA10103-DPB11901 DPA10103-DPB12301 DPA10103-DPB13101 DPA10103-DPB13401 DPA10103-DPB13901 DPA10103-DPB14001 DPA10103-DPB14101 DPA10103-DPB14801 DPA10103-DPB14901 DPA10103-DPB15001 DPA10103-DPB15101 DPA10103-DPB15501 DPA10103-DPB15901 DPA10103-DPB18001 DPA10104-DPB10101 DPA10104-DPB11501 DPA10105-DPB10101 DPA10105-DPB10401 DPA10105-DPB11801 DPA10105-DPB15001 DPA10106-DPB10101 DPA10201-DPB10101 DPA10201-DPB10201 DPA10201-DPB10202 DPA10201-DPB10401 DPA10201-DPB10501 DPA10201-DPB110601 DPA10201-DPB11501 DPA10201-DPB11601 DPA10201-DPB11901 DPA10201-DPB13401 DPA10201-DPB15501 DPA10202-DPB10101 DPA10202-DPB10201 DPA10202-DPB10202 DPA10202-DPB10401 DPA10202-DPB10501 DPA10202-DPB110601 DPA10202-DPB11101 DPA10202-DPB11301 DPA10202-DPB11801 DPA10202-DPB11901 DPA10202-DPB13101 DPA10202-DPB13801; note = HLAs: DPA10202-DPB15501 DPA10202-DPB16501 DPA10301-DPB10101 DPA10301-DPB10201 DPA10301-DPB10202 DPA10301-DPB10401 DPA10301-DPB10402 DPA10301-DPB110501 DPA10301-DPB110601 DPA10301-DPB11101 DPA10301-DPB11301 DPA10301-DPB11801 DPA10301-DPB12301 DPA10301-DPB13901 DPA10301-DPB14001 DPA10301-DPB14901 DPA10301-DPB15501 DPA10301-DPB16501 DPA10301-DPB17501 DPA10301-DPB18001 DPA10401-DPB10101 DPA10401-DPB10201 DPA10401-DPB10202 DPA10401-DPB10402 DPA10401-DPB10501 DPA10401-DPB110501 DPA10401-DPB14901
KEPPFLWWGFELYPDKWTVQ

SEQ ID NO: 6914 - protein, 20 aa, synthetic construct
  source 1..20: note = Seed: KEPPFLWMGYELHPDKWTVQ; note = HLAs: DRB1_0101 DRB1_0405 DRB1_1001 DPA10103-DPB10101 DPA10103-DPB10201 DPA10103-DPB10202 DPA10103-DPB10401 DPA10103-DPB10402 DPA10103-DPB10501 DPA10103-DPB110501 DPA10103-DPB112601 DPA10103-DPB11501 DPA10103-DPB11601 DPA10103-DPB11801 DPA10103-DPB11901 DPA10103-DPB12301 DPA10103-DPB13101 DPA10103-DPB13401 DPA10103-DPB13901 DPA10103-DPB14001 DPA10103-DPB14101 DPA10103-DPB14801 DPA10103-DPB14901 DPA10103-DPB15101 DPA10103-DPB15501 DPA10103-DPB15901 DPA10103-DPB18001 DPA10104-DPB10101 DPA10104-DPB11501 DPA10105-DPB10101 DPA10105-DPB10401 DPA10105-DPB11801 DPA10106-DPB10101 DPA10201-DPB10101 DPA10201-DPB10201 DPA10201-DPB10202 DPA10201-DPB10401 DPA10201-DPB10501 DPA10201-DPB110601 DPA10201-DPB11501 DPA10201-DPB11601 DPA10201-DPB11901 DPA10201-DPB13401 DPA10201-DPB15501 DPA10202-DPB10101 DPA10202-DPB10201 DPA10202-DPB10202 DPA10202-DPB10401 DPA10202-DPB10501 DPA10202-DPB110601 DPA10202-DPB11101 DPA10202-DPB11301 DPA10202-DPB11801 DPA10202-DPB11901 DPA10202-DPB13101 DPA10202-DPB13801; note = HLAs: DPA10202-DPB15501 DPA10202-DPB16501 DPA10301-DPB10101 DPA10301-DPB10201 DPA10301-DPB10202 DPA10301-DPB10401 DPA10301-DPB10402 DPA10301-DPB110501 DPA10301-DPB110601 DPA10301-DPB11101 DPA10301-DPB11301 DPA10301-DPB11801 DPA10301-DPB12301 DPA10301-DPB13901 DPA10301-DPB14001 DPA10301-DPB14901 DPA10301-DPB15501 DPA10301-DPB16501 DPA10301-DPB17501 DPA10301-DPB18001 DPA10401-DPB10201 DPA10401-DPB10202 DPA10401-DPB10402 DPA10401-DPB10501 DPA10401-DPB110501 DPA10401-DPB14901
KEPPFLWVGAELLPDKWTVQ

SEQ ID NO: 6915 - protein, 14 aa, synthetic construct
  source 1..14: note = Seed: PPFLWMGYELHPDK; note = HLAs: DPA10103-DPB10101 DPA10103-DPB10201 DPA10103-DPB10202 DPA10103-DPB10401 DPA10103-DPB112601 DPA10103-DPB11501 DPA10103-DPB11601 DPA10103-DPB11901 DPA10103-DPB12301 DPA10103-DPB13101 DPA10103-DPB13401 DPA10103-DPB13901 DPA10103-DPB14001 DPA10103-DPB14101 DPA10103-DPB14801 DPA10103-DPB15001 DPA10103-DPB15901 DPA10104-DPB10101 DPA10104-DPB11501 DPA10105-DPB10101 DPA10105-DPB10401 DPA10105-DPB15001 DPA10106-DPB10101 DPA10201-DPB10101 DPA10201-DPB110601 DPA10201-DPB11501 DPA10201-DPB11601 DPA10201-DPB11901 DPA10202-DPB10101 DPA10202-DPB10201 DPA10202-DPB10202 DPA10202-DPB10401 DPA10202-DPB110601 DPA10202-DPB11901 DPA10202-DPB13101 DPA10202-DPB16501 DPA10301-DPB10101 DPA10301-DPB10201 DPA10301-DPB10202 DPA10301-DPB10401 DPA10301-DPB10402 DPA10301-DPB110501 DPA10301-DPB110601 DPA10301-DPB11801 DPA10301-DPB12301 DPA10301-DPB13901 DPA10301-DPB14001 DPA10301-DPB14901 DPA10301-DPB15501 DPA10301-DPB16501 DPA10301-DPB17501 DPA10301-DPB18001 DPA10401-DPB10101 DPA10401-DPB10201; note = HLAs: DPA10401-DPB10202 DPA10401-DPB10402 DPA10401-DPB10501 DPA10401-DPB110501 DPA10401-DPB14901
PPFLWPGFELVPDK

SEQ ID NO: 6916 - protein, 14 aa, synthetic construct
  source 1..14: note = Seed: PPFLWMGYELHPDK; note = HLAs: DPA10103-DPB10101 DPA10103-DPB10201 DPA10103-DPB10202 DPA10103-DPB10401 DPA10103-DPB112601 DPA10103-DPB11501 DPA10103-DPB11601 DPA10103-DPB11901 DPA10103-DPB12301 DPA10103-DPB13101 DPA10103-DPB13401 DPA10103-DPB13901 DPA10103-DPB14001 DPA10103-DPB14101 DPA10103-DPB14801 DPA10103-DPB15001 DPA10103-DPB15901 DPA10104-DPB10101 DPA10104-DPB11501 DPA10105-DPB10101 DPA10105-DPB10401 DPA10105-DPB15001 DPA10106-DPB10101 DPA10201-DPB10101 DPA10201-DPB110601 DPA10201-DPB11501 DPA10201-DPB11601 DPA10201-DPB11901 DPA10202-DPB10101 DPA10202-DPB10201 DPA10202-DPB10202 DPA10202-DPB10401 DPA10202-DPB110601 DPA10202-DPB11901 DPA10202-DPB13101 DPA10202-DPB16501 DPA10301-DPB10101 DPA10301-DPB10201 DPA10301-DPB10202 DPA10301-DPB10401 DPA10301-DPB10402 DPA10301-DPB110501 DPA10301-DPB110601 DPA10301-DPB11801 DPA10301-DPB12301 DPA10301-DPB13901 DPA10301-DPB14001 DPA10301-DPB14901 DPA10301-DPB15501 DPA10301-DPB16501 DPA10301-DPB17501 DPA10301-DPB18001 DPA10401-DPB10101 DPA10401-DPB10201; note = HLAs: DPA10401-DPB10202 DPA10401-DPB10402 DPA10401-DPB10501 DPA10401-DPB110501 DPA10401-DPB14901
PPLLWTGFELEPDK

SEQ ID NO: 6917 - protein, 20 aa, synthetic construct
  source 1..20: note = Seed: KEPPFLWMGYELHPDKWTVQ; note = HLAs: DRB1_0101 DPA10103-DPB10101 DPA10103-DPB10201 DPA10103-DPB10202 DPA10103-DPB10401 DPA10103-DPB10402 DPA10103-DPB10501 DPA10103-DPB110501 DPA10103-DPB112601 DPA10103-DPB11501 DPA10103-DPB11601 DPA10103-DPB11801 DPA10103-DPB11901 DPA10103-DPB12301 DPA10103-DPB13101 DPA10103-DPB13401 DPA10103-DPB13901 DPA10103-DPB14001 DPA10103-DPB14101 DPA10103-DPB14801 DPA10103-DPB14901 DPA10103-DPB15001 DPA10103-DPB15101 DPA10103-DPB15501 DPA10103-DPB15901 DPA10103-DPB18001 DPA10104-DPB10101 DPA10104-DPB11501 DPA10105-DPB10101 DPA10105-DPB10401 DPA10105-DPB11801 DPA10105-DPB15001 DPA10106-DPB10101 DPA10201-DPB10101 DPA10201-DPB10201 DPA10201-DPB10202 DPA10201-DPB10401 DPA10201-DPB10501 DPA10201-DPB110601 DPA10201-DPB11501 DPA10201-DPB11601 DPA10201-DPB11901 DPA10201-DPB13401 DPA10201-DPB15501 DPA10202-DPB10101 DPA10202-DPB10201 DPA10202-DPB10202 DPA10202-DPB10401 DPA10202-DPB10501 DPA10202-DPB110601 DPA10202-DPB11101 DPA10202-DPB11301 DPA10202-DPB11801 DPA10202-DPB11901 DPA10202-DPB13101; note = HLAs: DPA10202-DPB13801 DPA10202-DPB15501 DPA10202-DPB16501 DPA10301-DPB10101 DPA10301-DPB10201 DPA10301-DPB10202 DPA10301-DPB10401 DPA10301-DPB10402 DPA10301-DPB110501 DPA10301-DPB110601 DPA10301-DPB11101 DPA10301-DPB11301 DPA10301-DPB11801 DPA10301-DPB12301 DPA10301-DPB13901 DPA10301-DPB14001 DPA10301-DPB14901 DPA10301-DPB15501 DPA10301-DPB16501 DPA10301-DPB17501 DPA10301-DPB18001 DPA10401-DPB10101 DPA10401-DPB10201 DPA10401-DPB10202 DPA10401-DPB10402 DPA10401-DPB10501 DPA10401-DPB110501 DPA10401-DPB14901
KEPPFLWWGFELAPDKWTVQ

SEQ ID NO: 6918 - protein, 14 aa, synthetic construct
  source 1..14: note = Seed: PPFLWMGYELHPDK; note = HLAs: DPA10103-DPB10101 DPA10103-DPB10201 DPA10103-DPB10202 DPA10103-DPB10401 DPA10103-DPB112601 DPA10103-DPB11501 DPA10103-DPB11601 DPA10103-DPB11901 DPA10103-DPB12301 DPA10103-DPB13101 DPA10103-DPB13401 DPA10103-DPB13901 DPA10103-DPB14001 DPA10103-DPB14101 DPA10103-DPB14801 DPA10103-DPB15001 DPA10103-DPB15901 DPA10104-DPB10101 DPA10104-DPB11501 DPA10105-DPB10101 DPA10105-DPB10401 DPA10105-DPB15001 DPA10106-DPB10101 DPA10201-DPB10101 DPA10201-DPB110601 DPA10201-DPB11501 DPA10201-DPB11601 DPA10201-DPB11901 DPA10202-DPB10101 DPA10202-DPB10201 DPA10202-DPB10202 DPA10202-DPB10401 DPA10202-DPB110601 DPA10202-DPB11901 DPA10202-DPB13101 DPA10202-DPB16501 DPA10301-DPB10101 DPA10301-DPB10201 DPA10301-DPB10202 DPA10301-DPB10401 DPA10301-DPB10402 DPA10301-DPB110501 DPA10301-DPB110601 DPA10301-DPB11801 DPA10301-DPB12301 DPA10301-DPB13901 DPA10301-DPB14001 DPA10301-DPB14901 DPA10301-DPB15501 DPA10301-DPB16501 DPA10301-DPB17501 DPA10301-DPB18001 DPA10401-DPB10101 DPA10401-DPB10201; note = HLAs: DPA10401-DPB10202 DPA10401-DPB10402 DPA10401-DPB10501 DPA10401-DPB110501 DPA10401-DPB14901
PPFLWTGFELWPDK

SEQ ID NO: 6919 - protein, 20 aa, synthetic construct
  source 1..20: note = Seed: KEPPFLWMGYELHPDKWTVQ; note = HLAs: DRB1_0101 DRB1_1001 DPA10103-DPB10101 DPA10103-DPB10201 DPA10103-DPB10202 DPA10103-DPB10401 DPA10103-DPB10402 DPA10103-DPB10501 DPA10103-DPB110501 DPA10103-DPB112601 DPA10103-DPB11501 DPA10103-DPB11601 DPA10103-DPB11801 DPA10103-DPB11901 DPA10103-DPB12301 DPA10103-DPB13101 DPA10103-DPB13401 DPA10103-DPB13901 DPA10103-DPB14001 DPA10103-DPB14101 DPA10103-DPB14801 DPA10103-DPB14901 DPA10103-DPB15001 DPA10103-DPB15101 DPA10103-DPB15501 DPA10103-DPB15901 DPA10103-DPB18001 DPA10104-DPB10101 DPA10104-DPB11501 DPA10105-DPB10101 DPA10105-DPB10401 DPA10105-DPB11801 DPA10105-DPB15001 DPA10106-DPB10101 DPA10201-DPB10101 DPA10201-DPB10201 DPA10201-DPB10202 DPA10201-DPB10401 DPA10201-DPB10501 DPA10201-DPB110601 DPA10201-DPB11501 DPA10201-DPB11601 DPA10201-DPB11901 DPA10201-DPB13401 DPA10201-DPB15501 DPA10202-DPB10101 DPA10202-DPB10201 DPA10202-DPB10202 DPA10202-DPB10401 DPA10202-DPB10501 DPA10202-DPB110601 DPA10202-DPB11101 DPA10202-DPB11301 DPA10202-DPB11801 DPA10202-DPB11901; note = HLAs: DPA10202-DPB13101 DPA10202-DPB13801 DPA10202-DPB15501 DPA10202-DPB16501 DPA10301-DPB10101 DPA10301-DPB10201 DPA10301-DPB10202 DPA10301-DPB10401 DPA10301-DPB10402 DPA10301-DPB110501 DPA10301-DPB110601 DPA10301-DPB11101 DPA10301-DPB11301 DPA10301-DPB11801 DPA10301-DPB12301 DPA10301-DPB13901 DPA10301-DPB14001 DPA10301-DPB14901 DPA10301-DPB15501 DPA10301-DPB16501 DPA10301-DPB17501 DPA10301-DPB18001 DPA10401-DPB10101 DPA10401-DPB10201 DPA10401-DPB10202 DPA10401-DPB10402 DPA10401-DPB10501 DPA10401-DPB110501 DPA10401-DPB14901
KEPPYLWLGFELMPDKWTVQ

SEQ ID NO: 6920 - protein, 14 aa, synthetic construct
  source 1..14: note = Seed: PPFLWMGYELHPDK; note = HLAs: DPA10103-DPB10101 DPA10103-DPB10201 DPA10103-DPB10202 DPA10103-DPB10401 DPA10103-DPB112601 DPA10103-DPB11601 DPA10103-DPB11901 DPA10103-DPB12301 DPA10103-DPB13101 DPA10103-DPB13401 DPA10103-DPB13901 DPA10103-DPB14001 DPA10103-DPB14801 DPA10103-DPB15901 DPA10104-DPB10101 DPA10105-DPB10101 DPA10105-DPB10401 DPA10106-DPB10101 DPA10201-DPB10101 DPA10201-DPB110601 DPA10201-DPB11601 DPA10201-DPB11901 DPA10202-DPB10101 DPA10202-DPB10201 DPA10202-DPB10202 DPA10202-DPB110601 DPA10202-DPB11901 DPA10202-DPB13101 DPA10202-DPB16501 DPA10301-DPB10201 DPA10301-DPB10202 DPA10301-DPB10402 DPA10301-DPB110501 DPA10301-DPB110601 DPA10301-DPB14901 DPA10301-DPB17501 DPA10301-DPB18001 DPA10401-DPB10101 DPA10401-DPB10201 DPA10401-DPB10202 DPA10401-DPB10402 DPA10401-DPB10501 DPA10401-DPB110501 DPA10401-DPB14901
PPCLWIGFELLPDK

SEQ ID NO: 6921 - protein, 20 aa, synthetic construct
  source 1..20: note = Seed: KEPPFLWMGYELHPDKWTVQ; note = HLAs: DRB1_0101 DPA10103-DPB10101 DPA10103-DPB10201 DPA10103-DPB10202 DPA10103-DPB10401 DPA10103-DPB10402 DPA10103-DPB10501 DPA10103-DPB110501 DPA10103-DPB112601 DPA10103-DPB11501 DPA10103-DPB11601 DPA10103-DPB11801 DPA10103-DPB11901 DPA10103-DPB12301 DPA10103-DPB13101 DPA10103-DPB13401 DPA10103-DPB13901 DPA10103-DPB14001 DPA10103-DPB14101 DPA10103-DPB14801 DPA10103-DPB14901 DPA10103-DPB15001 DPA10103-DPB15101 DPA10103-DPB15501 DPA10103-DPB15901 DPA10103-DPB18001 DPA10104-DPB10101 DPA10104-DPB11501 DPA10105-DPB10101 DPA10105-DPB10401 DPA10105-DPB11801 DPA10105-DPB15001 DPA10106-DPB10101 DPA10201-DPB10101 DPA10201-DPB10201 DPA10201-DPB10202 DPA10201-DPB10401 DPA10201-DPB10501 DPA10201-DPB110601 DPA10201-DPB11501 DPA10201-DPB11601 DPA10201-DPB11901 DPA10201-DPB13401 DPA10201-DPB15501 DPA10202-DPB10101 DPA10202-DPB10201 DPA10202-DPB10202 DPA10202-DPB10401 DPA10202-DPB10501 DPA10202-DPB110601 DPA10202-DPB11101 DPA10202-DPB11301 DPA10202-DPB11801 DPA10202-DPB11901 DPA10202-DPB13101; note = HLAs: DPA10202-DPB13801 DPA10202-DPB15501 DPA10202-DPB16501 DPA10301-DPB10101 DPA10301-DPB10201 DPA10301-DPB10202 DPA10301-DPB10401 DPA10301-DPB10402 DPA10301-DPB110501 DPA10301-DPB110601 DPA10301-DPB11101 DPA10301-DPB11301 DPA10301-DPB11801 DPA10301-DPB12301 DPA10301-DPB13901 DPA10301-DPB14001 DPA10301-DPB14901 DPA10301-DPB15501 DPA10301-DPB16501 DPA10301-DPB17501 DPA10301-DPB18001 DPA10401-DPB10101 DPA10401-DPB10201 DPA10401-DPB10202 DPA10401-DPB10402 DPA10401-DPB10501 DPA10401-DPB110501 DPA10401-DPB14901
KEPPYLWDGFELLPDKWTVQ

SEQ ID NO: 6922 - protein, 14 aa, synthetic construct
  source 1..14: note = Seed: PPFLWMGYELHPDK; note = HLAs: DPA10103-DPB10101 DPA10103-DPB10201 DPA10103-DPB10202 DPA10103-DPB10401 DPA10103-DPB112601 DPA10103-DPB11501 DPA10103-DPB11601 DPA10103-DPB11901 DPA10103-DPB12301 DPA10103-DPB13101 DPA10103-DPB13401 DPA10103-DPB13901 DPA10103-DPB14001 DPA10103-DPB14101 DPA10103-DPB14801 DPA10103-DPB15001 DPA10103-DPB15901 DPA10104-DPB10101 DPA10104-DPB11501 DPA10105-DPB10101 DPA10105-DPB10401 DPA10105-DPB15001 DPA10106-DPB10101 DPA10201-DPB10101 DPA10201-DPB110601 DPA10201-DPB11501 DPA10201-DPB11601 DPA10201-DPB11901 DPA10202-DPB10101 DPA10202-DPB10201 DPA10202-DPB10202 DPA10202-DPB10401 DPA10202-DPB110601 DPA10202-DPB11901 DPA10202-DPB13101 DPA10202-DPB16501 DPA10301-DPB10101 DPA10301-DPB10201 DPA10301-DPB10202 DPA10301-DPB10401 DPA10301-DPB10402 DPA10301-DPB110501 DPA10301-DPB110601 DPA10301-DPB11801 DPA10301-DPB12301 DPA10301-DPB13901 DPA10301-DPB14001 DPA10301-DPB14901 DPA10301-DPB15501 DPA10301-DPB16501 DPA10301-DPB17501 DPA10301-DPB18001 DPA10401-DPB10101 DPA10401-DPB10201; note = HLAs: DPA10401-DPB10202 DPA10401-DPB10402 DPA10401-DPB10501 DPA10401-DPB110501 DPA10401-DPB14901
PPYLWWGFELVPDK

SEQ ID NO: 6923 - protein, 14 aa, synthetic construct
  source 1..14: note = Seed: PPFLWMGYELHPDK; note = HLAs: DPA10103-DPB10101 DPA10103-DPB10201 DPA10103-DPB10202 DPA10103-DPB10401 DPA10103-DPB112601 DPA10103-DPB11501 DPA10103-DPB11601 DPA10103-DPB11901 DPA10103-DPB12301 DPA10103-DPB13101 DPA10103-DPB13401 DPA10103-DPB13901 DPA10103-DPB14001 DPA10103-DPB14101 DPA10103-DPB14801 DPA10103-DPB15001 DPA10103-DPB15901 DPA10104-DPB10101 DPA10104-DPB11501 DPA10105-DPB10101 DPA10105-DPB10401 DPA10105-DPB15001 DPA10106-DPB10101 DPA10201-DPB10101 DPA10201-DPB110601 DPA10201-DPB11501 DPA10201-DPB11601 DPA10201-DPB11901 DPA10202-DPB10101 DPA10202-DPB10201 DPA10202-DPB10202 DPA10202-DPB10401 DPA10202-DPB110601 DPA10202-DPB11901 DPA10202-DPB13101 DPA10202-DPB16501 DPA10301-DPB10101 DPA10301-DPB10201 DPA10301-DPB10202 DPA10301-DPB10401 DPA10301-DPB10402 DPA10301-DPB110501 DPA10301-DPB110601 DPA10301-DPB11801 DPA10301-DPB12301 DPA10301-DPB13901 DPA10301-DPB14001 DPA10301-DPB14901 DPA10301-DPB15501 DPA10301-DPB16501 DPA10301-DPB17501 DPA10301-DPB18001 DPA10401-DPB10101 DPA10401-DPB10201; note = HLAs: DPA10401-DPB10202 DPA10401-DPB10402 DPA10401-DPB10501 DPA10401-DPB110501 DPA10401-DPB14901
PPFLWTGWELYPDK

SEQ ID NO: 6924 - protein, 14 aa, synthetic construct
  source 1..14: note = Seed: PPFLWMGYELHPDK; note = HLAs: DPA10103-DPB10101 DPA10103-DPB10201 DPA10103-DPB10202 DPA10103-DPB10401 DPA10103-DPB112601 DPA10103-DPB11501 DPA10103-DPB11601 DPA10103-DPB11901 DPA10103-DPB12301 DPA10103-DPB13101 DPA10103-DPB13401 DPA10103-DPB13901 DPA10103-DPB14001 DPA10103-DPB14101 DPA10103-DPB14801 DPA10103-DPB15001 DPA10103-DPB15901 DPA10104-DPB10101 DPA10104-DPB11501 DPA10105-DPB10101 DPA10105-DPB10401 DPA10105-DPB15001 DPA10106-DPB10101 DPA10201-DPB10101 DPA10201-DPB110601 DPA10201-DPB11501 DPA10201-DPB11601 DPA10201-DPB11901 DPA10202-DPB10101 DPA10202-DPB10201 DPA10202-DPB10202 DPA10202-DPB10401 DPA10202-DPB110601 DPA10202-DPB11901 DPA10202-DPB13101 DPA10202-DPB16501 DPA10301-DPB10101 DPA10301-DPB10201 DPA10301-DPB10202 DPA10301-DPB10401 DPA10301-DPB10402 DPA10301-DPB110501 DPA10301-DPB110601 DPA10301-DPB11801 DPA10301-DPB12301 DPA10301-DPB13901 DPA10301-DPB14001 DPA10301-DPB14901 DPA10301-DPB15501 DPA10301-DPB16501 DPA10301-DPB17501 DPA10301-DPB18001 DPA10401-DPB10101 DPA10401-DPB10201; note = HLAs: DPA10401-DPB10202 DPA10401-DPB10402 DPA10401-DPB10501 DPA10401-DPB110501 DPA10401-DPB14901
PPFLWHGIELFPDK

SEQ ID NO: 6925 - protein, 20 aa, synthetic construct
  source 1..20: note = Seed: KEPPFLWMGYELHPDKWTVQ; note = HLAs: DPA10103-DPB10101 DPA10103-DPB10201 DPA10103-DPB10202 DPA10103-DPB10401 DPA10103-DPB10402 DPA10103-DPB10501 DPA10103-DPB110501 DPA10103-DPB112601 DPA10103-DPB11501 DPA10103-DPB11601 DPA10103-DPB11801 DPA10103-DPB11901 DPA10103-DPB12301 DPA10103-DPB13101 DPA10103-DPB13401 DPA10103-DPB13901 DPA10103-DPB14001 DPA10103-DPB14101 DPA10103-DPB14801 DPA10103-DPB14901 DPA10103-DPB15001 DPA10103-DPB15101 DPA10103-DPB15501 DPA10103-DPB15901 DPA10103-DPB18001 DPA10104-DPB10101 DPA10104-DPB11501 DPA10105-DPB10101 DPA10105-DPB10401 DPA10105-DPB11801 DPA10105-DPB15001 DPA10106-DPB10101 DPA10201-DPB10101 DPA10201-DPB10201 DPA10201-DPB10202 DPA10201-DPB10401 DPA10201-DPB10501 DPA10201-DPB110601 DPA10201-DPB11501 DPA10201-DPB11601 DPA10201-DPB11901 DPA10201-DPB13401 DPA10201-DPB15501 DPA10202-DPB10101 DPA10202-DPB10201 DPA10202-DPB10202 DPA10202-DPB10401 DPA10202-DPB10501 DPA10202-DPB110601 DPA10202-DPB11101 DPA10202-DPB11301 DPA10202-DPB11801 DPA10202-DPB11901 DPA10202-DPB13101 DPA10202-DPB13801; note = HLAs: DPA10202-DPB15501 DPA10202-DPB16501 DPA10301-DPB10101 DPA10301-DPB10201 DPA10301-DPB10202 DPA10301-DPB10401 DPA10301-DPB10402 DPA10301-DPB110501 DPA10301-DPB110601 DPA10301-DPB11101 DPA10301-DPB11301 DPA10301-DPB11801 DPA10301-DPB12301 DPA10301-DPB13901 DPA10301-DPB14001 DPA10301-DPB14901 DPA10301-DPB15501 DPA10301-DPB16501 DPA10301-DPB17501 DPA10301-DPB18001 DPA10401-DPB10101 DPA10401-DPB10201 DPA10401-DPB10202 DPA10401-DPB10402 DPA10401-DPB10501 DPA10401-DPB110501 DPA10401-DPB14901
KEPPILWAGFELFPDKWTVQ

SEQ ID NO: 6926 - protein, 14 aa, synthetic construct
  source 1..14: note = Seed: PPFLWMGYELHPDK; note = HLAs: DPA10103-DPB10101 DPA10103-DPB10201 DPA10103-DPB10202 DPA10103-DPB10401 DPA10103-DPB112601 DPA10103-DPB11501 DPA10103-DPB11601 DPA10103-DPB11901 DPA10103-DPB12301 DPA10103-DPB13101 DPA10103-DPB13401 DPA10103-DPB13901 DPA10103-DPB14001 DPA10103-DPB14101 DPA10103-DPB14801 DPA10103-DPB15001 DPA10103-DPB15901 DPA10104-DPB10101 DPA10104-DPB11501 DPA10105-DPB10101 DPA10105-DPB10401 DPA10105-DPB15001 DPA10106-DPB10101 DPA10201-DPB10101 DPA10201-DPB110601 DPA10201-DPB11501 DPA10201-DPB11601 DPA10201-DPB11901 DPA10202-DPB10101 DPA10202-DPB10201 DPA10202-DPB10202 DPA10202-DPB10401 DPA10202-DPB110601 DPA10202-DPB11901 DPA10202-DPB13101 DPA10202-DPB16501 DPA10301-DPB10101 DPA10301-DPB10201 DPA10301-DPB10202 DPA10301-DPB10401 DPA10301-DPB10402 DPA10301-DPB110501 DPA10301-DPB110601 DPA10301-DPB11801 DPA10301-DPB12301 DPA10301-DPB13901 DPA10301-DPB14001 DPA10301-DPB14901 DPA10301-DPB15501 DPA10301-DPB16501 DPA10301-DPB17501 DPA10301-DPB18001 DPA10401-DPB10101 DPA10401-DPB10201; note = HLAs: DPA10401-DPB10202 DPA10401-DPB10402 DPA10401-DPB10501 DPA10401-DPB110501 DPA10401-DPB14901
PPLLWNGFELFPDK

SEQ ID NO: 6927 - protein, 20 aa, synthetic construct
  source 1..20: note = Seed: KEPPFLWMGYELHPDKWTVQ; note = HLAs: DPA10103-DPB10101 DPA10103-DPB10201 DPA10103-DPB10202 DPA10103-DPB10401 DPA10103-DPB10402 DPA10103-DPB10501 DPA10103-DPB110501 DPA10103-DPB112601 DPA10103-DPB11501 DPA10103-DPB11601 DPA10103-DPB11801 DPA10103-DPB11901 DPA10103-DPB12301 DPA10103-DPB13101 DPA10103-DPB13401 DPA10103-DPB13901 DPA10103-DPB14001 DPA10103-DPB14101 DPA10103-DPB14801 DPA10103-DPB14901 DPA10103-DPB15001 DPA10103-DPB15101 DPA10103-DPB15501 DPA10103-DPB15901 DPA10103-DPB18001 DPA10104-DPB10101 DPA10104-DPB11501 DPA10105-DPB10101 DPA10105-DPB10401 DPA10105-DPB11801 DPA10105-DPB15001 DPA10106-DPB10101 DPA10201-DPB10101 DPA10201-DPB10201 DPA10201-DPB10202 DPA10201-DPB10401 DPA10201-DPB10501 DPA10201-DPB110601 DPA10201-DPB11501 DPA10201-DPB11601 DPA10201-DPB11901 DPA10201-DPB13401 DPA10201-DPB15501 DPA10202-DPB10101 DPA10202-DPB10201 DPA10202-DPB10202 DPA10202-DPB10401 DPA10202-DPB10501 DPA10202-DPB110601 DPA10202-DPB11101 DPA10202-DPB11301 DPA10202-DPB11801 DPA10202-DPB11901 DPA10202-DPB13101 DPA10202-DPB13801; note = HLAs: DPA10202-DPB15501 DPA10202-DPB16501 DPA10301-DPB10101 DPA10301-DPB10201 DPA10301-DPB10202 DPA10301-DPB10401 DPA10301-DPB10402 DPA10301-DPB110501 DPA10301-DPB110601 DPA10301-DPB11101 DPA10301-DPB11301 DPA10301-DPB11801 DPA10301-DPB12301 DPA10301-DPB13901 DPA10301-DPB14001 DPA10301-DPB14901 DPA10301-DPB15501 DPA10301-DPB16501 DPA10301-DPB17501 DPA10301-DPB18001 DPA10401-DPB10101 DPA10401-DPB10201 DPA10401-DPB10202 DPA10401-DPB10402 DPA10401-DPB10501 DPA10401-DPB110501 DPA10401-DPB14901
KEPPWLWAGFELFPDKWTVQ

SEQ ID NO: 6928 - protein, 20 aa, synthetic construct
  source 1..20: note = Seed: KEPPFLWMGYELHPDKWTVQ; note = HLAs: DPA10103-DPB10101 DPA10103-DPB10201 DPA10103-DPB10202 DPA10103-DPB10401 DPA10103-DPB10402 DPA10103-DPB10501 DPA10103-DPB110501 DPA10103-DPB112601 DPA10103-DPB11501 DPA10103-DPB11601 DPA10103-DPB11801 DPA10103-DPB11901 DPA10103-DPB12301 DPA10103-DPB13101 DPA10103-DPB13401 DPA10103-DPB13901 DPA10103-DPB14001 DPA10103-DPB14101 DPA10103-DPB14801 DPA10103-DPB14901 DPA10103-DPB15001 DPA10103-DPB15101 DPA10103-DPB15501 DPA10103-DPB15901 DPA10103-DPB18001 DPA10104-DPB10101 DPA10104-DPB11501 DPA10105-DPB10101 DPA10105-DPB10401 DPA10105-DPB11801 DPA10105-DPB15001 DPA10106-DPB10101 DPA10201-DPB10101 DPA10201-DPB10201 DPA10201-DPB10202 DPA10201-DPB10401 DPA10201-DPB10501 DPA10201-DPB110601 DPA10201-DPB11501 DPA10201-DPB11601 DPA10201-DPB11901 DPA10201-DPB13401 DPA10201-DPB15501 DPA10202-DPB10101 DPA10202-DPB10201 DPA10202-DPB10202 DPA10202-DPB10401 DPA10202-DPB10501 DPA10202-DPB110601 DPA10202-DPB11101 DPA10202-DPB11301 DPA10202-DPB11801 DPA10202-DPB11901 DPA10202-DPB13101 DPA10202-DPB13801; note = HLAs: DPA10202-DPB15501 DPA10202-DPB16501 DPA10301-DPB10101 DPA10301-DPB10201 DPA10301-DPB10202 DPA10301-DPB10401 DPA10301-DPB10402 DPA10301-DPB110501 DPA10301-DPB110601 DPA10301-DPB11101 DPA10301-DPB11801 DPA10301-DPB12301 DPA10301-DPB13901 DPA10301-DPB14001 DPA10301-DPB14901 DPA10301-DPB16501 DPA10301-DPB17501 DPA10301-DPB18001 DPA10401-DPB10101 DPA10401-DPB10201 DPA10401-DPB10202 DPA10401-DPB10402 DPA10401-DPB10501 DPA10401-DPB110501 DPA10401-DPB14901
KEPPFLWVGFELKPDKWTVQ

SEQ ID NO: 6929 - protein, 20 aa, synthetic construct
  source 1..20: note = Seed: KEPPFLWMGYELHPDKWTVQ; note = HLAs: DPA10103-DPB10101 DPA10103-DPB10201 DPA10103-DPB10202 DPA10103-DPB10401 DPA10103-DPB10402 DPA10103-DPB10501 DPA10103-DPB110501 DPA10103-DPB112601 DPA10103-DPB11501 DPA10103-DPB11601 DPA10103-DPB11801 DPA10103-DPB11901 DPA10103-DPB12301 DPA10103-DPB13101 DPA10103-DPB13401 DPA10103-DPB13901 DPA10103-DPB14001 DPA10103-DPB14101 DPA10103-DPB14801 DPA10103-DPB14901 DPA10103-DPB15001 DPA10103-DPB15101 DPA10103-DPB15501 DPA10103-DPB15901 DPA10103-DPB18001 DPA10104-DPB10101 DPA10104-DPB11501 DPA10105-DPB10101 DPA10105-DPB10401 DPA10105-DPB11801 DPA10105-DPB15001 DPA10106-DPB10101 DPA10201-DPB10101 DPA10201-DPB10201 DPA10201-DPB10202 DPA10201-DPB10401 DPA10201-DPB10501 DPA10201-DPB110601 DPA10201-DPB11501 DPA10201-DPB11601 DPA10201-DPB11901 DPA10201-DPB13401 DPA10201-DPB15501 DPA10202-DPB10101 DPA10202-DPB10201 DPA10202-DPB10202 DPA10202-DPB10401 DPA10202-DPB10501 DPA10202-DPB110601 DPA10202-DPB11101 DPA10202-DPB11301 DPA10202-DPB11801 DPA10202-DPB11901 DPA10202-DPB13101 DPA10202-DPB13801; note = HLAs: DPA10202-DPB15501 DPA10202-DPB16501 DPA10301-DPB10101 DPA10301-DPB10201 DPA10301-DPB10202 DPA10301-DPB10401 DPA10301-DPB10402 DPA10301-DPB110501 DPA10301-DPB110601 DPA10301-DPB11801 DPA10301-DPB12301 DPA10301-DPB13901 DPA10301-DPB14001 DPA10301-DPB14901 DPA10301-DPB16501 DPA10301-DPB17501 DPA10301-DPB18001 DPA10401-DPB10101 DPA10401-DPB10201 DPA10401-DPB10202 DPA10401-DPB10402 DPA10401-DPB10501 DPA10401-DPB110501 DPA10401-DPB14901
KEPPVLWQGFELLPDKWTVQ

SEQ ID NO: 6930 - protein, 20 aa, synthetic construct
  source 1..20: note = Seed: KEPPFLWMGYELHPDKWTVQ; note = HLAs: DRB1_1001 DPA10103-DPB10101 DPA10103-DPB10201 DPA10103-DPB10202 DPA10103-DPB10401 DPA10103-DPB10402 DPA10103-DPB10501 DPA10103-DPB110501 DPA10103-DPB112601 DPA10103-DPB11501 DPA10103-DPB11601 DPA10103-DPB11801 DPA10103-DPB11901 DPA10103-DPB12301 DPA10103-DPB13101 DPA10103-DPB13401 DPA10103-DPB13901 DPA10103-DPB14001 DPA10103-DPB14101 DPA10103-DPB14801 DPA10103-DPB14901 DPA10103-DPB15001 DPA10103-DPB15101 DPA10103-DPB15501 DPA10103-DPB15901 DPA10103-DPB18001 DPA10104-DPB10101 DPA10104-DPB11501 DPA10105-DPB10101 DPA10105-DPB10401 DPA10105-DPB11801 DPA10105-DPB15001 DPA10106-DPB10101 DPA10201-DPB10101 DPA10201-DPB10201 DPA10201-DPB10202 DPA10201-DPB10401 DPA10201-DPB10501 DPA10201-DPB110601 DPA10201-DPB11501 DPA10201-DPB11601 DPA10201-DPB11901 DPA10201-DPB13401 DPA10201-DPB15501 DPA10202-DPB10101 DPA10202-DPB10201 DPA10202-DPB10202 DPA10202-DPB10401 DPA10202-DPB10501 DPA10202-DPB110601 DPA10202-DPB11101 DPA10202-DPB11301 DPA10202-DPB11801 DPA10202-DPB11901 DPA10202-DPB13101; note = HLAs: DPA10202-DPB13801 DPA10202-DPB15501 DPA10202-DPB16501 DPA10301-DPB10101 DPA10301-DPB10201 DPA10301-DPB10202 DPA10301-DPB10401 DPA10301-DPB10402 DPA10301-DPB110501 DPA10301-DPB110601 DPA10301-DPB11101 DPA10301-DPB11301 DPA10301-DPB11801 DPA10301-DPB12301 DPA10301-DPB13901 DPA10301-DPB14001 DPA10301-DPB14901 DPA10301-DPB15501 DPA10301-DPB16501 DPA10301-DPB17501 DPA10301-DPB18001 DPA10401-DPB10101 DPA10401-DPB10201 DPA10401-DPB10202 DPA10401-DPB10402 DPA10401-DPB10501 DPA10401-DPB110501 DPA10401-DPB14901
KEPPFLWQGFELEPDKWTVQ

SEQ ID NO: 6931 - protein, 14 aa, synthetic construct
  source 1..14: note = Seed: PPFLWMGYELHPDK; note = HLAs: DPA10103-DPB10101 DPA10103-DPB10201 DPA10103-DPB10202 DPA10103-DPB10401 DPA10103-DPB112601 DPA10103-DPB11501 DPA10103-DPB11601 DPA10103-DPB11901 DPA10103-DPB12301 DPA10103-DPB13101 DPA10103-DPB13401 DPA10103-DPB13901 DPA10103-DPB14001 DPA10103-DPB14101 DPA10103-DPB14801 DPA10103-DPB15001 DPA10103-DPB15901 DPA10104-DPB10101 DPA10104-DPB11501 DPA10105-DPB10101 DPA10105-DPB10401 DPA10105-DPB15001 DPA10106-DPB10101 DPA10201-DPB10101 DPA10201-DPB110601 DPA10201-DPB11501 DPA10201-DPB11601 DPA10201-DPB11901 DPA10202-DPB10101 DPA10202-DPB10201 DPA10202-DPB10202 DPA10202-DPB10401 DPA10202-DPB110601 DPA10202-DPB11901 DPA10202-DPB13101 DPA10202-DPB16501 DPA10301-DPB10101 DPA10301-DPB10201 DPA10301-DPB10202 DPA10301-DPB10401 DPA10301-DPB10402 DPA10301-DPB110501 DPA10301-DPB110601 DPA10301-DPB11801 DPA10301-DPB12301 DPA10301-DPB13901 DPA10301-DPB14001 DPA10301-DPB14901 DPA10301-DPB15501 DPA10301-DPB16501 DPA10301-DPB17501 DPA10301-DPB18001 DPA10401-DPB10101 DPA10401-DPB10201; note = HLAs: DPA10401-DPB10202 DPA10401-DPB10402 DPA10401-DPB10501 DPA10401-DPB110501 DPA10401-DPB14901
PPFLWDGFELTPDK

SEQ ID NO: 6932 - protein, 20 aa, synthetic construct
  source 1..20: note = Seed: KEPPFLWMGYELHPDKWTVQ; note = HLAs: DRB1_1001 DPA10103-DPB10101 DPA10103-DPB10201 DPA10103-DPB10202 DPA10103-DPB10401 DPA10103-DPB10402 DPA10103-DPB10501 DPA10103-DPB110501 DPA10103-DPB112601 DPA10103-DPB11501 DPA10103-DPB11601 DPA10103-DPB11801 DPA10103-DPB11901 DPA10103-DPB12301 DPA10103-DPB13101 DPA10103-DPB13401 DPA10103-DPB13901 DPA10103-DPB14001 DPA10103-DPB14101 DPA10103-DPB14801 DPA10103-DPB14901 DPA10103-DPB15001 DPA10103-DPB15101 DPA10103-DPB15501 DPA10103-DPB15901 DPA10103-DPB18001 DPA10104-DPB10101 DPA10104-DPB11501 DPA10105-DPB10101 DPA10105-DPB10401 DPA10105-DPB11801 DPA10105-DPB15001 DPA10106-DPB10101 DPA10201-DPB10101 DPA10201-DPB10201 DPA10201-DPB10202 DPA10201-DPB10401 DPA10201-DPB10501 DPA10201-DPB110601 DPA10201-DPB11501 DPA10201-DPB11601 DPA10201-DPB11901 DPA10201-DPB13401 DPA10201-DPB15501 DPA10202-DPB10101 DPA10202-DPB10201 DPA10202-DPB10202 DPA10202-DPB10401 DPA10202-DPB10501 DPA10202-DPB110601 DPA10202-DPB11101 DPA10202-DPB11301 DPA10202-DPB11801 DPA10202-DPB11901 DPA10202-DPB13101; note = HLAs: DPA10202-DPB13801 DPA10202-DPB15501 DPA10202-DPB16501 DPA10301-DPB10101 DPA10301-DPB10201 DPA10301-DPB10202 DPA10301-DPB10401 DPA10301-DPB10402 DPA10301-DPB110501 DPA10301-DPB110601 DPA10301-DPB11101 DPA10301-DPB11301 DPA10301-DPB11801 DPA10301-DPB12301 DPA10301-DPB13901 DPA10301-DPB14001 DPA10301-DPB14901 DPA10301-DPB15501 DPA10301-DPB16501 DPA10301-DPB17501 DPA10301-DPB18001 DPA10401-DPB10101 DPA10401-DPB10201 DPA10401-DPB10202 DPA10401-DPB10402 DPA10401-DPB10501 DPA10401-DPB110501 DPA10401-DPB14901
KEPPFLWTGYELNPDKWTVQ

SEQ ID NO: 6933 - protein, 20 aa, synthetic construct
  source 1..20: note = Seed: KEPPFLWMGYELHPDKWTVQ; note = HLAs: DRB1_0101 DRB1_1001 DPA10103-DPB10101 DPA10103-DPB10201 DPA10103-DPB10202 DPA10103-DPB10401 DPA10103-DPB10402 DPA10103-DPB10501 DPA10103-DPB110501 DPA10103-DPB112601 DPA10103-DPB11501 DPA10103-DPB11601 DPA10103-DPB11801 DPA10103-DPB11901 DPA10103-DPB12301 DPA10103-DPB13101 DPA10103-DPB13401 DPA10103-DPB13901 DPA10103-DPB14001 DPA10103-DPB14101 DPA10103-DPB14801 DPA10103-DPB14901 DPA10103-DPB15001 DPA10103-DPB15101 DPA10103-DPB15501 DPA10103-DPB15901 DPA10103-DPB18001 DPA10104-DPB10101 DPA10104-DPB11501 DPA10105-DPB10101 DPA10105-DPB10401 DPA10105-DPB11801 DPA10105-DPB15001 DPA10106-DPB10101 DPA10201-DPB10101 DPA10201-DPB10201 DPA10201-DPB10202 DPA10201-DPB10401 DPA10201-DPB10501 DPA10201-DPB110601 DPA10201-DPB11501 DPA10201-DPB11601 DPA10201-DPB11901 DPA10201-DPB13401 DPA10201-DPB15501 DPA10202-DPB10101 DPA10202-DPB10201 DPA10202-DPB10202 DPA10202-DPB10401 DPA10202-DPB10501 DPA10202-DPB110601 DPA10202-DPB11101 DPA10202-DPB11301 DPA10202-DPB11801 DPA10202-DPB11901; note = HLAs: DPA10202-DPB13101 DPA10202-DPB13801 DPA10202-DPB15501 DPA10202-DPB16501 DPA10301-DPB10101 DPA10301-DPB10201 DPA10301-DPB10202 DPA10301-DPB10401 DPA10301-DPB10402 DPA10301-DPB110501 DPA10301-DPB110601 DPA10301-DPB11101 DPA10301-DPB11301 DPA10301-DPB11801 DPA10301-DPB12301 DPA10301-DPB13901 DPA10301-DPB14001 DPA10301-DPB14901 DPA10301-DPB15501 DPA10301-DPB16501 DPA10301-DPB17501 DPA10301-DPB18001 DPA10401-DPB10101 DPA10401-DPB10201 DPA10401-DPB10202 DPA10401-DPB10402 DPA10401-DPB10501 DPA10401-DPB110501 DPA10401-DPB14901
KEPPFLWIGLELLPDKWTVQ

SEQ ID NO: 6934 - protein, 14 aa, synthetic construct
  source 1..14: note = Seed: PPFLWMGYELHPDK; note = HLAs: DRB1_1001 DPA10103-DPB10101 DPA10103-DPB10201 DPA10103-DPB10202 DPA10103-DPB10401 DPA10103-DPB112601 DPA10103-DPB11501 DPA10103-DPB11601 DPA10103-DPB11901 DPA10103-DPB12301 DPA10103-DPB13101 DPA10103-DPB13401 DPA10103-DPB13901 DPA10103-DPB14001 DPA10103-DPB14101 DPA10103-DPB14801 DPA10103-DPB15001 DPA10103-DPB15901 DPA10104-DPB10101 DPA10104-DPB11501 DPA10105-DPB10101 DPA10105-DPB10401 DPA10105-DPB15001 DPA10106-DPB10101 DPA10201-DPB10101 DPA10201-DPB110601 DPA10201-DPB11501 DPA10201-DPB11601 DPA10201-DPB11901 DPA10202-DPB10101 DPA10202-DPB10201 DPA10202-DPB10202 DPA10202-DPB10401 DPA10202-DPB110601 DPA10202-DPB11901 DPA10202-DPB13101 DPA10202-DPB16501 DPA10301-DPB10101 DPA10301-DPB10201 DPA10301-DPB10202 DPA10301-DPB10401 DPA10301-DPB10402 DPA10301-DPB110501 DPA10301-DPB110601 DPA10301-DPB11801 DPA10301-DPB12301 DPA10301-DPB13901 DPA10301-DPB14001 DPA10301-DPB14901 DPA10301-DPB15501 DPA10301-DPB16501 DPA10301-DPB17501 DPA10301-DPB18001 DPA10401-DPB10101 DPA10401-DPB10201; note = HLAs: DPA10401-DPB10202 DPA10401-DPB10402 DPA10401-DPB10501 DPA10401-DPB110501 DPA10401-DPB14901
PPFLWTGVELIPDK

SEQ ID NO: 6935 - protein, 20 aa, synthetic construct
  source 1..20: note = Seed: KEPPFLWMGYELHPDKWTVQ; note = HLAs: DRB1_0101 DRB1_1001 DPA10103-DPB10101 DPA10103-DPB10201 DPA10103-DPB10202 DPA10103-DPB10401 DPA10103-DPB10402 DPA10103-DPB10501 DPA10103-DPB110501 DPA10103-DPB112601 DPA10103-DPB11501 DPA10103-DPB11601 DPA10103-DPB11801 DPA10103-DPB11901 DPA10103-DPB12301 DPA10103-DPB13101 DPA10103-DPB13401 DPA10103-DPB13901 DPA10103-DPB14001 DPA10103-DPB14101 DPA10103-DPB14801 DPA10103-DPB14901 DPA10103-DPB15001 DPA10103-DPB15101 DPA10103-DPB15501 DPA10103-DPB15901 DPA10103-DPB18001 DPA10104-DPB10101 DPA10104-DPB11501 DPA10105-DPB10101 DPA10105-DPB10401 DPA10105-DPB11801 DPA10105-DPB15001 DPA10106-DPB10101 DPA10201-DPB10101 DPA10201-DPB10201 DPA10201-DPB10202 DPA10201-DPB10401 DPA10201-DPB10501 DPA10201-DPB110601 DPA10201-DPB11501 DPA10201-DPB11601 DPA10201-DPB11901 DPA10201-DPB13401 DPA10201-DPB15501 DPA10202-DPB10101 DPA10202-DPB10201 DPA10202-DPB10202 DPA10202-DPB10401 DPA10202-DPB10501 DPA10202-DPB110601 DPA10202-DPB11101 DPA10202-DPB11301 DPA10202-DPB11801 DPA10202-DPB11901; note = HLAs: DPA10202-DPB13101 DPA10202-DPB13801 DPA10202-DPB15501 DPA10202-DPB16501 DPA10301-DPB10101 DPA10301-DPB10201 DPA10301-DPB10202 DPA10301-DPB10401 DPA10301-DPB10402 DPA10301-DPB110501 DPA10301-DPB110601 DPA10301-DPB11101 DPA10301-DPB11301 DPA10301-DPB11801 DPA10301-DPB12301 DPA10301-DPB13901 DPA10301-DPB14001 DPA10301-DPB14901 DPA10301-DPB15501 DPA10301-DPB16501 DPA10301-DPB17501 DPA10301-DPB18001 DPA10401-DPB10101 DPA10401-DPB10201 DPA10401-DPB10202 DPA10401-DPB10402 DPA10401-DPB10501 DPA10401-DPB110501 DPA10401-DPB14901
KEPPFLWNGIELIPDKWTVQ

SEQ ID NO: 6936 - protein, 14 aa, synthetic construct
  source 1..14: note = Seed: PPFLWMGYELHPDK; note = HLAs: DPA10103-DPB10101 DPA10103-DPB10201 DPA10103-DPB10202 DPA10103-DPB10401 DPA10103-DPB112601 DPA10103-DPB11501 DPA10103-DPB11601 DPA10103-DPB11901 DPA10103-DPB12301 DPA10103-DPB13101 DPA10103-DPB13401 DPA10103-DPB13901 DPA10103-DPB14001 DPA10103-DPB14101 DPA10103-DPB14801 DPA10103-DPB15001 DPA10103-DPB15901 DPA10104-DPB10101 DPA10104-DPB11501 DPA10105-DPB10101 DPA10105-DPB10401 DPA10105-DPB15001 DPA10106-DPB10101 DPA10201-DPB10101 DPA10201-DPB110601 DPA10201-DPB11501 DPA10201-DPB11601 DPA10201-DPB11901 DPA10202-DPB10101 DPA10202-DPB10201 DPA10202-DPB10202 DPA10202-DPB10401 DPA10202-DPB110601 DPA10202-DPB11901 DPA10202-DPB13101 DPA10202-DPB16501 DPA10301-DPB10101 DPA10301-DPB10201 DPA10301-DPB10202 DPA10301-DPB10401 DPA10301-DPB10402 DPA10301-DPB110501 DPA10301-DPB110601 DPA10301-DPB11801 DPA10301-DPB12301 DPA10301-DPB13901 DPA10301-DPB14001 DPA10301-DPB14901 DPA10301-DPB15501 DPA10301-DPB16501 DPA10301-DPB17501 DPA10301-DPB18001 DPA10401-DPB10101 DPA10401-DPB10201; note = HLAs: DPA10401-DPB10202 DPA10401-DPB10402 DPA10401-DPB10501 DPA10401-DPB110501 DPA10401-DPB14901
PPFLWEGFELPPDK

SEQ ID NO: 6937 - protein, 14 aa, synthetic construct
  source 1..14: note = Seed: PPFLWMGYELHPDK; note = HLAs: DPA10103-DPB10101 DPA10103-DPB10201 DPA10103-DPB10202 DPA10103-DPB10401 DPA10103-DPB112601 DPA10103-DPB11501 DPA10103-DPB11601 DPA10103-DPB11901 DPA10103-DPB12301 DPA10103-DPB13101 DPA10103-DPB13401 DPA10103-DPB13901 DPA10103-DPB14001 DPA10103-DPB14101 DPA10103-DPB14801 DPA10103-DPB15001 DPA10103-DPB15901 DPA10104-DPB10101 DPA10104-DPB11501 DPA10105-DPB10101 DPA10105-DPB10401 DPA10105-DPB15001 DPA10106-DPB10101 DPA10201-DPB10101 DPA10201-DPB110601 DPA10201-DPB11501 DPA10201-DPB11601 DPA10201-DPB11901 DPA10202-DPB10101 DPA10202-DPB10201 DPA10202-DPB10202 DPA10202-DPB10401 DPA10202-DPB110601 DPA10202-DPB11901 DPA10202-DPB13101 DPA10202-DPB16501 DPA10301-DPB10101 DPA10301-DPB10201 DPA10301-DPB10202 DPA10301-DPB10401 DPA10301-DPB10402 DPA10301-DPB110501 DPA10301-DPB110601 DPA10301-DPB11801 DPA10301-DPB12301 DPA10301-DPB13901 DPA10301-DPB14001 DPA10301-DPB14901 DPA10301-DPB15501 DPA10301-DPB16501 DPA10301-DPB17501 DPA10301-DPB18001 DPA10401-DPB10101 DPA10401-DPB10201; note = HLAs: DPA10401-DPB10202 DPA10401-DPB10402 DPA10401-DPB10501 DPA10401-DPB110501 DPA10401-DPB14901
PPYLWSGFELNPDK

SEQ ID NO: 6938 - protein, 20 aa, synthetic construct
  source 1..20: note = Seed: KEPPFLWMGYELHPDKWTVQ; note = HLAs: DRB1_0101 DPA10103-DPB10101 DPA10103-DPB10201 DPA10103-DPB10202 DPA10103-DPB10401 DPA10103-DPB10402 DPA10103-DPB10501 DPA10103-DPB110501 DPA10103-DPB112601 DPA10103-DPB11501 DPA10103-DPB11601 DPA10103-DPB11801 DPA10103-DPB11901 DPA10103-DPB12301 DPA10103-DPB13101 DPA10103-DPB13401 DPA10103-DPB13901 DPA10103-DPB14001 DPA10103-DPB14101 DPA10103-DPB14801 DPA10103-DPB14901 DPA10103-DPB15001 DPA10103-DPB15101 DPA10103-DPB15501 DPA10103-DPB15901 DPA10103-DPB18001 DPA10104-DPB10101 DPA10104-DPB11501 DPA10105-DPB10101 DPA10105-DPB10401 DPA10105-DPB11801 DPA10105-DPB15001 DPA10106-DPB10101 DPA10201-DPB10101 DPA10201-DPB10201 DPA10201-DPB10202 DPA10201-DPB10401 DPA10201-DPB10501 DPA10201-DPB110601 DPA10201-DPB11501 DPA10201-DPB11601 DPA10201-DPB11901 DPA10201-DPB13401 DPA10201-DPB15501 DPA10202-DPB10101 DPA10202-DPB10201 DPA10202-DPB10202 DPA10202-DPB10401 DPA10202-DPB10501 DPA10202-DPB110601 DPA10202-DPB11101 DPA10202-DPB11301 DPA10202-DPB11801 DPA10202-DPB11901 DPA10202-DPB13101; note = HLAs: DPA10202-DPB13801 DPA10202-DPB15501 DPA10202-DPB16501 DPA10301-DPB10101 DPA10301-DPB10201 DPA10301-DPB10202 DPA10301-DPB10401 DPA10301-DPB10402 DPA10301-DPB110501 DPA10301-DPB110601 DPA10301-DPB11101 DPA10301-DPB11301 DPA10301-DPB11801 DPA10301-DPB12301 DPA10301-DPB13901 DPA10301-DPB14001 DPA10301-DPB14901 DPA10301-DPB15501 DPA10301-DPB16501 DPA10301-DPB17501 DPA10301-DPB18001 DPA10401-DPB10101 DPA10401-DPB10201 DPA10401-DPB10202 DPA10401-DPB10402 DPA10401-DPB10501 DPA10401-DPB110501 DPA10401-DPB14901
KEPPFLWWGYELLPDKWTVQ

SEQ ID NO: 6939 - protein, 14 aa, synthetic construct
  source 1..14: note = Seed: PPFLWMGYELHPDK; note = HLAs: DPA10103-DPB10101 DPA10103-DPB10201 DPA10103-DPB10202 DPA10103-DPB10401 DPA10103-DPB112601 DPA10103-DPB11501 DPA10103-DPB11601 DPA10103-DPB11901 DPA10103-DPB12301 DPA10103-DPB13101 DPA10103-DPB13401 DPA10103-DPB13901 DPA10103-DPB14001 DPA10103-DPB14101 DPA10103-DPB14801 DPA10103-DPB15001 DPA10103-DPB15901 DPA10104-DPB10101 DPA10104-DPB11501 DPA10105-DPB10101 DPA10105-DPB10401 DPA10105-DPB15001 DPA10106-DPB10101 DPA10201-DPB10101 DPA10201-DPB110601 DPA10201-DPB11501 DPA10201-DPB11601 DPA10201-DPB11901 DPA10202-DPB10101 DPA10202-DPB10201 DPA10202-DPB10202 DPA10202-DPB10401 DPA10202-DPB110601 DPA10202-DPB11901 DPA10202-DPB13101 DPA10202-DPB16501 DPA10301-DPB10101 DPA10301-DPB10201 DPA10301-DPB10202 DPA10301-DPB10401 DPA10301-DPB10402 DPA10301-DPB110501 DPA10301-DPB110601 DPA10301-DPB11801 DPA10301-DPB12301 DPA10301-DPB13901 DPA10301-DPB14001 DPA10301-DPB14901 DPA10301-DPB15501 DPA10301-DPB16501 DPA10301-DPB17501 DPA10301-DPB18001 DPA10401-DPB10101 DPA10401-DPB10201; note = HLAs: DPA10401-DPB10202 DPA10401-DPB10402 DPA10401-DPB10501 DPA10401-DPB110501 DPA10401-DPB14901
PPFLWHGLELMPDK

SEQ ID NO: 6940 - protein, 14 aa, synthetic construct
  source 1..14: note = Seed: PPFLWMGYELHPDK; note = HLAs: DPA10103-DPB10101 DPA10103-DPB10201 DPA10103-DPB10202 DPA10103-DPB10401 DPA10103-DPB112601 DPA10103-DPB11501 DPA10103-DPB11601 DPA10103-DPB11901 DPA10103-DPB12301 DPA10103-DPB13101 DPA10103-DPB13401 DPA10103-DPB13901 DPA10103-DPB14001 DPA10103-DPB14101 DPA10103-DPB14801 DPA10103-DPB15001 DPA10103-DPB15901 DPA10104-DPB10101 DPA10104-DPB11501 DPA10105-DPB10101 DPA10105-DPB10401 DPA10105-DPB15001 DPA10106-DPB10101 DPA10201-DPB10101 DPA10201-DPB110601 DPA10201-DPB11501 DPA10201-DPB11601 DPA10201-DPB11901 DPA10202-DPB10101 DPA10202-DPB10201 DPA10202-DPB10202 DPA10202-DPB10401 DPA10202-DPB110601 DPA10202-DPB11901 DPA10202-DPB13101 DPA10202-DPB16501 DPA10301-DPB10101 DPA10301-DPB10201 DPA10301-DPB10202 DPA10301-DPB10401 DPA10301-DPB10402 DPA10301-DPB110501 DPA10301-DPB110601 DPA10301-DPB11801 DPA10301-DPB12301 DPA10301-DPB13901 DPA10301-DPB14001 DPA10301-DPB14901 DPA10301-DPB15501 DPA10301-DPB16501 DPA10301-DPB17501 DPA10301-DPB18001 DPA10401-DPB10101 DPA10401-DPB10201; note = HLAs: DPA10401-DPB10202 DPA10401-DPB10402 DPA10401-DPB10501 DPA10401-DPB110501 DPA10401-DPB14901
PPFLWEGWELFPDK

SEQ ID NO: 6941 - protein, 14 aa, synthetic construct
  source 1..14: note = Seed: PPFLWMGYELHPDK; note = HLAs: DPA10103-DPB10101 DPA10103-DPB10201 DPA10103-DPB10202 DPA10103-DPB10401 DPA10103-DPB112601 DPA10103-DPB11501 DPA10103-DPB11601 DPA10103-DPB11901 DPA10103-DPB12301 DPA10103-DPB13101 DPA10103-DPB13401 DPA10103-DPB13901 DPA10103-DPB14001 DPA10103-DPB14101 DPA10103-DPB14801 DPA10103-DPB15001 DPA10103-DPB15901 DPA10104-DPB10101 DPA10104-DPB11501 DPA10105-DPB10101 DPA10105-DPB10401 DPA10105-DPB15001 DPA10106-DPB10101 DPA10201-DPB10101 DPA10201-DPB110601 DPA10201-DPB11501 DPA10201-DPB11601 DPA10201-DPB11901 DPA10202-DPB10101 DPA10202-DPB10201 DPA10202-DPB10202 DPA10202-DPB10401 DPA10202-DPB110601 DPA10202-DPB11901 DPA10202-DPB13101 DPA10202-DPB16501 DPA10301-DPB10101 DPA10301-DPB10201 DPA10301-DPB10202 DPA10301-DPB10401 DPA10301-DPB10402 DPA10301-DPB110501 DPA10301-DPB110601 DPA10301-DPB11801 DPA10301-DPB12301 DPA10301-DPB13901 DPA10301-DPB14001 DPA10301-DPB14901 DPA10301-DPB15501 DPA10301-DPB16501 DPA10301-DPB17501 DPA10301-DPB18001 DPA10401-DPB10101 DPA10401-DPB10201; note = HLAs: DPA10401-DPB10202 DPA10401-DPB10402 DPA10401-DPB10501 DPA10401-DPB110501 DPA10401-DPB14901
PPLLWNGFELMPDK

SEQ ID NO: 6942 - protein, 14 aa, synthetic construct
  source 1..14: note = Seed: PPFLWMGYELHPDK; note = HLAs: DPA10103-DPB10101 DPA10103-DPB10201 DPA10103-DPB10202 DPA10103-DPB10401 DPA10103-DPB112601 DPA10103-DPB11501 DPA10103-DPB11601 DPA10103-DPB11901 DPA10103-DPB12301 DPA10103-DPB13101 DPA10103-DPB13401 DPA10103-DPB13901 DPA10103-DPB14001 DPA10103-DPB14101 DPA10103-DPB14801 DPA10103-DPB15001 DPA10103-DPB15901 DPA10104-DPB10101 DPA10104-DPB11501 DPA10105-DPB10101 DPA10105-DPB10401 DPA10105-DPB15001 DPA10106-DPB10101 DPA10201-DPB10101 DPA10201-DPB110601 DPA10201-DPB11501 DPA10201-DPB11601 DPA10201-DPB11901 DPA10202-DPB10101 DPA10202-DPB10201 DPA10202-DPB10202 DPA10202-DPB10401 DPA10202-DPB110601 DPA10202-DPB11901 DPA10202-DPB13101 DPA10202-DPB16501 DPA10301-DPB10101 DPA10301-DPB10201 DPA10301-DPB10202 DPA10301-DPB10401 DPA10301-DPB10402 DPA10301-DPB110501 DPA10301-DPB110601 DPA10301-DPB11801 DPA10301-DPB12301 DPA10301-DPB13901 DPA10301-DPB14001 DPA10301-DPB14901 DPA10301-DPB15501 DPA10301-DPB16501 DPA10301-DPB17501 DPA10301-DPB18001 DPA10401-DPB10101 DPA10401-DPB10201; note = HLAs: DPA10401-DPB10202 DPA10401-DPB10402 DPA10401-DPB10501 DPA10401-DPB110501 DPA10401-DPB14901
PPFLWKGFELTPDK

SEQ ID NO: 6943 - protein, 14 aa, synthetic construct
  source 1..14: note = Seed: PPFLWMGYELHPDK; note = HLAs: DRB1_1001 DPA10103-DPB10201 DPA10103-DPB10202 DPA10103-DPB10401 DPA10103-DPB112601 DPA10103-DPB11501 DPA10103-DPB11601 DPA10103-DPB11901 DPA10103-DPB12301 DPA10103-DPB13401 DPA10103-DPB13901 DPA10103-DPB14001 DPA10103-DPB14101 DPA10103-DPB14801 DPA10103-DPB15901 DPA10104-DPB11501 DPA10105-DPB10401 DPA10106-DPB10101 DPA10201-DPB10101 DPA10201-DPB110601 DPA10201-DPB11501 DPA10201-DPB11601 DPA10201-DPB11901 DPA10202-DPB10101 DPA10202-DPB10201 DPA10202-DPB10202 DPA10202-DPB10401 DPA10202-DPB110601 DPA10202-DPB11901 DPA10202-DPB13101 DPA10202-DPB16501 DPA10301-DPB10101 DPA10301-DPB10201 DPA10301-DPB10202 DPA10301-DPB10401 DPA10301-DPB10402 DPA10301-DPB110501 DPA10301-DPB110601 DPA10301-DPB11801 DPA10301-DPB12301 DPA10301-DPB13901 DPA10301-DPB14001 DPA10301-DPB14901 DPA10301-DPB15501 DPA10301-DPB16501 DPA10301-DPB17501 DPA10301-DPB18001 DPA10401-DPB10201 DPA10401-DPB10202 DPA10401-DPB10402 DPA10401-DPB110501 DPA10401-DPB14901
PPFLWVGAELLPDK

SEQ ID NO: 6944 - protein, 14 aa, synthetic construct
  source 1..14: note = Seed: PPFLWMGYELHPDK; note = HLAs: DRB1_1001 DPA10103-DPB10101 DPA10103-DPB10201 DPA10103-DPB10202 DPA10103-DPB10401 DPA10103-DPB112601 DPA10103-DPB11501 DPA10103-DPB11601 DPA10103-DPB11901 DPA10103-DPB12301 DPA10103-DPB13101 DPA10103-DPB13401 DPA10103-DPB13901 DPA10103-DPB14001 DPA10103-DPB14101 DPA10103-DPB14801 DPA10103-DPB15001 DPA10103-DPB15901 DPA10104-DPB10101 DPA10104-DPB11501 DPA10105-DPB10101 DPA10105-DPB10401 DPA10105-DPB15001 DPA10106-DPB10101 DPA10201-DPB10101 DPA10201-DPB110601 DPA10201-DPB11501 DPA10201-DPB11601 DPA10201-DPB11901 DPA10202-DPB10101 DPA10202-DPB10201 DPA10202-DPB10202 DPA10202-DPB10401 DPA10202-DPB110601 DPA10202-DPB11901 DPA10202-DPB13101 DPA10202-DPB16501 DPA10301-DPB10101 DPA10301-DPB10201 DPA10301-DPB10202 DPA10301-DPB10401 DPA10301-DPB10402 DPA10301-DPB110501 DPA10301-DPB110601 DPA10301-DPB11801 DPA10301-DPB12301 DPA10301-DPB13901 DPA10301-DPB14001 DPA10301-DPB14901 DPA10301-DPB15501 DPA10301-DPB16501 DPA10301-DPB17501 DPA10301-DPB18001 DPA10401-DPB10101 DPA10401-DPB10201; note = HLAs: DPA10401-DPB10202 DPA10401-DPB10402 DPA10401-DPB10501 DPA10401-DPB110501 DPA10401-DPB14901
PPYLWIGFELNPDK

SEQ ID NO: 6945 - protein, 14 aa, synthetic construct
  source 1..14: note = Seed: PPFLWMGYELHPDK; note = HLAs: DPA10103-DPB10101 DPA10103-DPB10201 DPA10103-DPB10202 DPA10103-DPB10401 DPA10103-DPB112601 DPA10103-DPB11501 DPA10103-DPB11601 DPA10103-DPB11901 DPA10103-DPB12301 DPA10103-DPB13101 DPA10103-DPB13401 DPA10103-DPB13901 DPA10103-DPB14001 DPA10103-DPB14101 DPA10103-DPB14801 DPA10103-DPB15001 DPA10103-DPB15901 DPA10104-DPB10101 DPA10104-DPB11501 DPA10105-DPB10101 DPA10105-DPB10401 DPA10105-DPB15001 DPA10106-DPB10101 DPA10201-DPB10101 DPA10201-DPB110601 DPA10201-DPB11501 DPA10201-DPB11601 DPA10201-DPB11901 DPA10202-DPB10101 DPA10202-DPB10201 DPA10202-DPB10202 DPA10202-DPB10401 DPA10202-DPB110601 DPA10202-DPB11901 DPA10202-DPB13101 DPA10202-DPB16501 DPA10301-DPB10101 DPA10301-DPB10201 DPA10301-DPB10202 DPA10301-DPB10401 DPA10301-DPB10402 DPA10301-DPB110501 DPA10301-DPB110601 DPA10301-DPB11801 DPA10301-DPB12301 DPA10301-DPB13901 DPA10301-DPB14001 DPA10301-DPB14901 DPA10301-DPB15501 DPA10301-DPB16501 DPA10301-DPB17501 DPA10301-DPB18001 DPA10401-DPB10101 DPA10401-DPB10201; note = HLAs: DPA10401-DPB10202 DPA10401-DPB10402 DPA10401-DPB10501 DPA10401-DPB110501 DPA10401-DPB14901
PPWLWEGFELAPDK

SEQ ID NO: 6946 - protein, 20 aa, synthetic construct
  source 1..20: note = Seed: KEPPFLWMGYELHPDKWTVQ; note = HLAs: DRB1_0101 DRB1_0405 DRB1_1001 DPA10103-DPB10101 DPA10103-DPB10201 DPA10103-DPB10202 DPA10103-DPB10401 DPA10103-DPB10402 DPA10103-DPB10501 DPA10103-DPB110501 DPA10103-DPB112601 DPA10103-DPB11501 DPA10103-DPB11601 DPA10103-DPB11801 DPA10103-DPB11901 DPA10103-DPB12301 DPA10103-DPB13101 DPA10103-DPB13401 DPA10103-DPB13901 DPA10103-DPB14001 DPA10103-DPB14101 DPA10103-DPB14801 DPA10103-DPB14901 DPA10103-DPB15001 DPA10103-DPB15101 DPA10103-DPB15501 DPA10103-DPB15901 DPA10103-DPB18001 DPA10104-DPB10101 DPA10104-DPB11501 DPA10105-DPB10101 DPA10105-DPB10401 DPA10105-DPB11801 DPA10105-DPB15001 DPA10106-DPB10101 DPA10201-DPB10101 DPA10201-DPB10201 DPA10201-DPB10202 DPA10201-DPB10401 DPA10201-DPB10501 DPA10201-DPB110601 DPA10201-DPB11501 DPA10201-DPB11601 DPA10201-DPB11901 DPA10201-DPB13401 DPA10201-DPB15501 DPA10202-DPB10101 DPA10202-DPB10201 DPA10202-DPB10202 DPA10202-DPB10401 DPA10202-DPB10501 DPA10202-DPB110601 DPA10202-DPB11101 DPA10202-DPB11301 DPA10202-DPB11801 DPA10202-DPB11901; note = HLAs: DPA10202-DPB13101 DPA10202-DPB13801 DPA10202-DPB15501 DPA10202-DPB16501 DPA10301-DPB10101 DPA10301-DPB10201 DPA10301-DPB10202 DPA10301-DPB10401 DPA10301-DPB10402 DPA10301-DPB110501 DPA10301-DPB110601 DPA10301-DPB11101 DPA10301-DPB11301 DPA10301-DPB11801 DPA10301-DPB12301 DPA10301-DPB13901 DPA10301-DPB14001 DPA10301-DPB14901 DPA10301-DPB15501 DPA10301-DPB16501 DPA10301-DPB17501 DPA10301-DPB18001 DPA10401-DPB10101 DPA10401-DPB10201 DPA10401-DPB10202 DPA10401-DPB10402 DPA10401-DPB10501 DPA10401-DPB110501 DPA10401-DPB14901
KEPPFLWQGIELIPDKWTVQ

SEQ ID NO: 6947 - protein, 14 aa, synthetic construct
  source 1..14: note = Seed: PPFLWMGYELHPDK; note = HLAs: DPA10103-DPB10101 DPA10103-DPB10201 DPA10103-DPB10202 DPA10103-DPB10401 DPA10103-DPB112601 DPA10103-DPB11501 DPA10103-DPB11601 DPA10103-DPB11901 DPA10103-DPB12301 DPA10103-DPB13101 DPA10103-DPB13401 DPA10103-DPB13901 DPA10103-DPB14001 DPA10103-DPB14101 DPA10103-DPB14801 DPA10103-DPB15001 DPA10103-DPB15901 DPA10104-DPB10101 DPA10104-DPB11501 DPA10105-DPB10101 DPA10105-DPB10401 DPA10105-DPB15001 DPA10106-DPB10101 DPA10201-DPB10101 DPA10201-DPB110601 DPA10201-DPB11501 DPA10201-DPB11601 DPA10201-DPB11901 DPA10202-DPB10101 DPA10202-DPB10201 DPA10202-DPB10202 DPA10202-DPB10401 DPA10202-DPB110601 DPA10202-DPB11901 DPA10202-DPB13101 DPA10202-DPB16501 DPA10301-DPB10101 DPA10301-DPB10201 DPA10301-DPB10202 DPA10301-DPB10401 DPA10301-DPB10402 DPA10301-DPB110501 DPA10301-DPB110601 DPA10301-DPB11801 DPA10301-DPB12301 DPA10301-DPB13901 DPA10301-DPB14001 DPA10301-DPB14901 DPA10301-DPB15501 DPA10301-DPB16501 DPA10301-DPB17501 DPA10301-DPB18001 DPA10401-DPB10101 DPA10401-DPB10201; note = HLAs: DPA10401-DPB10202 DPA10401-DPB10402 DPA10401-DPB10501 DPA10401-DPB110501 DPA10401-DPB14901
PPFLWTGMELFPDK

SEQ ID NO: 6948 - protein, 20 aa, synthetic construct
  source 1..20: note = Seed: KEPPFLWMGYELHPDKWTVQ; note = HLAs: DPA10103-DPB10101 DPA10103-DPB10201 DPA10103-DPB10202 DPA10103-DPB10401 DPA10103-DPB10402 DPA10103-DPB10501 DPA10103-DPB110501 DPA10103-DPB112601 DPA10103-DPB11501 DPA10103-DPB11601 DPA10103-DPB11801 DPA10103-DPB11901 DPA10103-DPB12301 DPA10103-DPB13101 DPA10103-DPB13401 DPA10103-DPB13901 DPA10103-DPB14001 DPA10103-DPB14101 DPA10103-DPB14801 DPA10103-DPB14901 DPA10103-DPB15001 DPA10103-DPB15101 DPA10103-DPB15501 DPA10103-DPB15901 DPA10103-DPB18001 DPA10104-DPB10101 DPA10104-DPB11501 DPA10105-DPB10101 DPA10105-DPB10401 DPA10105-DPB11801 DPA10105-DPB15001 DPA10106-DPB10101 DPA10201-DPB10101 DPA10201-DPB10201 DPA10201-DPB10202 DPA10201-DPB10401 DPA10201-DPB10501 DPA10201-DPB110601 DPA10201-DPB11501 DPA10201-DPB11601 DPA10201-DPB11901 DPA10201-DPB13401 DPA10201-DPB15501 DPA10202-DPB10101 DPA10202-DPB10201 DPA10202-DPB10202 DPA10202-DPB10401 DPA10202-DPB10501 DPA10202-DPB110601 DPA10202-DPB11101 DPA10202-DPB11301 DPA10202-DPB11801 DPA10202-DPB11901 DPA10202-DPB13101 DPA10202-DPB13801; note = HLAs: DPA10202-DPB15501 DPA10202-DPB16501 DPA10301-DPB10101 DPA10301-DPB10201 DPA10301-DPB10202 DPA10301-DPB10401 DPA10301-DPB10402 DPA10301-DPB110501 DPA10301-DPB110601 DPA10301-DPB11101 DPA10301-DPB11301 DPA10301-DPB11801 DPA10301-DPB12301 DPA10301-DPB13901 DPA10301-DPB14001 DPA10301-DPB14901 DPA10301-DPB15501 DPA10301-DPB16501 DPA10301-DPB17501 DPA10301-DPB18001 DPA10401-DPB10101 DPA10401-DPB10201 DPA10401-DPB10202 DPA10401-DPB10402 DPA10401-DPB10501 DPA10401-DPB110501 DPA10401-DPB14901
KEPPILWNGFELFPDKWTVQ

SEQ ID NO: 6949 - protein, 14 aa, synthetic construct
  source 1..14: note = Seed: PPFLWMGYELHPDK; note = HLAs: DRB1_1001 DPA10103-DPB10101 DPA10103-DPB10201 DPA10103-DPB10202 DPA10103-DPB10401 DPA10103-DPB112601 DPA10103-DPB11501 DPA10103-DPB11601 DPA10103-DPB11901 DPA10103-DPB12301 DPA10103-DPB13101 DPA10103-DPB13401 DPA10103-DPB13901 DPA10103-DPB14001 DPA10103-DPB14101 DPA10103-DPB14801 DPA10103-DPB15001 DPA10103-DPB15901 DPA10104-DPB10101 DPA10104-DPB11501 DPA10105-DPB10101 DPA10105-DPB10401 DPA10105-DPB15001 DPA10106-DPB10101 DPA10201-DPB10101 DPA10201-DPB110601 DPA10201-DPB11501 DPA10201-DPB11601 DPA10201-DPB11901 DPA10202-DPB10101 DPA10202-DPB10201 DPA10202-DPB10202 DPA10202-DPB110601 DPA10202-DPB11901 DPA10202-DPB13101 DPA10202-DPB16501 DPA10301-DPB10101 DPA10301-DPB10201 DPA10301-DPB10202 DPA10301-DPB10401 DPA10301-DPB10402 DPA10301-DPB110501 DPA10301-DPB110601 DPA10301-DPB11801 DPA10301-DPB12301 DPA10301-DPB13901 DPA10301-DPB14001 DPA10301-DPB14901 DPA10301-DPB15501 DPA10301-DPB16501 DPA10301-DPB17501 DPA10301-DPB18001 DPA10401-DPB10101 DPA10401-DPB10201 DPA10401-DPB10202; note = HLAs: DPA10401-DPB10402 DPA10401-DPB10501 DPA10401-DPB110501 DPA10401-DPB14901
PPFLWIGIELMPDK

SEQ ID NO: 6950 - protein, 14 aa, synthetic construct
  source 1..14: note = Seed: PPFLWMGYELHPDK; note = HLAs: DRB1_1001 DPA10103-DPB11501 DPA10103-DPB13401 DPA10103-DPB14001 DPA10104-DPB11501 DPA10201-DPB11501 DPA10202-DPB10101 DPA10202-DPB10201 DPA10202-DPB10202 DPA10202-DPB10401 DPA10202-DPB110601 DPA10202-DPB11901 DPA10202-DPB13101 DPA10202-DPB16501 DPA10301-DPB10201 DPA10301-DPB10202 DPA10301-DPB10402 DPA10301-DPB110501 DPA10301-DPB11801 DPA10301-DPB14001 DPA10301-DPB14901 DPA10301-DPB18001
PPFLWLGTELLPDK

SEQ ID NO: 6951 - protein, 14 aa, synthetic construct
  source 1..14: note = Seed: PPFLWMGYELHPDK; note = HLAs: DPA10103-DPB10101 DPA10103-DPB10201 DPA10103-DPB10202 DPA10103-DPB10401 DPA10103-DPB112601 DPA10103-DPB11501 DPA10103-DPB11601 DPA10103-DPB11901 DPA10103-DPB12301 DPA10103-DPB13101 DPA10103-DPB13401 DPA10103-DPB13901 DPA10103-DPB14001 DPA10103-DPB14101 DPA10103-DPB14801 DPA10103-DPB15001 DPA10103-DPB15901 DPA10104-DPB10101 DPA10104-DPB11501 DPA10105-DPB10101 DPA10105-DPB10401 DPA10105-DPB15001 DPA10106-DPB10101 DPA10201-DPB10101 DPA10201-DPB110601 DPA10201-DPB11501 DPA10201-DPB11601 DPA10201-DPB11901 DPA10202-DPB10101 DPA10202-DPB10201 DPA10202-DPB10202 DPA10202-DPB10401 DPA10202-DPB110601 DPA10202-DPB11901 DPA10202-DPB13101 DPA10202-DPB16501 DPA10301-DPB10101 DPA10301-DPB10201 DPA10301-DPB10202 DPA10301-DPB10401 DPA10301-DPB10402 DPA10301-DPB110501 DPA10301-DPB110601 DPA10301-DPB11801 DPA10301-DPB12301 DPA10301-DPB13901 DPA10301-DPB14001 DPA10301-DPB14901 DPA10301-DPB15501 DPA10301-DPB16501 DPA10301-DPB17501 DPA10301-DPB18001 DPA10401-DPB10101 DPA10401-DPB10201; note = HLAs: DPA10401-DPB10202 DPA10401-DPB10402 DPA10401-DPB10501 DPA10401-DPB110501 DPA10401-DPB14901
PPYLWCGFELLPDK

SEQ ID NO: 6952 - protein, 20 aa, synthetic construct
  source 1..20: note = Seed: KEPPFLWMGYELHPDKWTVQ; note = HLAs: DRB1_0101 DRB1_0405 DRB1_1001 DPA10103-DPB10101 DPA10103-DPB10201 DPA10103-DPB10202 DPA10103-DPB10401 DPA10103-DPB10402 DPA10103-DPB10501 DPA10103-DPB110501 DPA10103-DPB112601 DPA10103-DPB11501 DPA10103-DPB11601 DPA10103-DPB11801 DPA10103-DPB11901 DPA10103-DPB12301 DPA10103-DPB13401 DPA10103-DPB13901 DPA10103-DPB14001 DPA10103-DPB14101 DPA10103-DPB14801 DPA10103-DPB14901 DPA10103-DPB15001 DPA10103-DPB15101 DPA10103-DPB15501 DPA10103-DPB15901 DPA10103-DPB18001 DPA10104-DPB10101 DPA10104-DPB11501 DPA10105-DPB10101 DPA10105-DPB10401 DPA10105-DPB11801 DPA10105-DPB15001 DPA10106-DPB10101 DPA10201-DPB10101 DPA10201-DPB10201 DPA10201-DPB10202 DPA10201-DPB10401 DPA10201-DPB10501 DPA10201-DPB110601 DPA10201-DPB11501 DPA10201-DPB11601 DPA10201-DPB11901 DPA10201-DPB13401 DPA10201-DPB15501 DPA10202-DPB10101 DPA10202-DPB10201 DPA10202-DPB10202 DPA10202-DPB10401 DPA10202-DPB10501 DPA10202-DPB110601 DPA10202-DPB11101 DPA10202-DPB11801 DPA10202-DPB11901 DPA10202-DPB13101 DPA10202-DPB13801; note = HLAs: DPA10202-DPB15501 DPA10202-DPB16501 DPA10301-DPB10101 DPA10301-DPB10201 DPA10301-DPB10202 DPA10301-DPB10401 DPA10301-DPB10402 DPA10301-DPB110501 DPA10301-DPB110601 DPA10301-DPB11101 DPA10301-DPB11301 DPA10301-DPB11801 DPA10301-DPB12301 DPA10301-DPB13901 DPA10301-DPB14001 DPA10301-DPB14901 DPA10301-DPB15501 DPA10301-DPB16501 DPA10301-DPB17501 DPA10301-DPB18001 DPA10401-DPB10201 DPA10401-DPB10202 DPA10401-DPB10402 DPA10401-DPB10501 DPA10401-DPB110501 DPA10401-DPB14901
KEPPFLWMGIELLPDKWTVQ

SEQ ID NO: 6953 - protein, 20 aa, synthetic construct
  source 1..20: note = Seed: KEPPFLWMGYELHPDKWTVQ; note = HLAs: DPA10103-DPB10101 DPA10103-DPB10201 DPA10103-DPB10202 DPA10103-DPB10401 DPA10103-DPB10402 DPA10103-DPB10501 DPA10103-DPB110501 DPA10103-DPB112601 DPA10103-DPB11501 DPA10103-DPB11601 DPA10103-DPB11801 DPA10103-DPB11901 DPA10103-DPB12301 DPA10103-DPB13101 DPA10103-DPB13401 DPA10103-DPB13901 DPA10103-DPB14001 DPA10103-DPB14101 DPA10103-DPB14801 DPA10103-DPB14901 DPA10103-DPB15001 DPA10103-DPB15101 DPA10103-DPB15501 DPA10103-DPB15901 DPA10103-DPB18001 DPA10104-DPB10101 DPA10104-DPB11501 DPA10105-DPB10101 DPA10105-DPB10401 DPA10105-DPB11801 DPA10105-DPB15001 DPA10106-DPB10101 DPA10201-DPB10101 DPA10201-DPB10201 DPA10201-DPB10202 DPA10201-DPB10401 DPA10201-DPB10501 DPA10201-DPB110601 DPA10201-DPB11501 DPA10201-DPB11601 DPA10201-DPB11901 DPA10201-DPB13401 DPA10201-DPB15501 DPA10202-DPB10101 DPA10202-DPB10201 DPA10202-DPB10202 DPA10202-DPB10401 DPA10202-DPB10501 DPA10202-DPB110601 DPA10202-DPB11101 DPA10202-DPB11301 DPA10202-DPB11801 DPA10202-DPB11901 DPA10202-DPB13101 DPA10202-DPB13801; note = HLAs: DPA10202-DPB15501 DPA10202-DPB16501 DPA10301-DPB10101 DPA10301-DPB10201 DPA10301-DPB10202 DPA10301-DPB10401 DPA10301-DPB10402 DPA10301-DPB110501 DPA10301-DPB110601 DPA10301-DPB11101 DPA10301-DPB11301 DPA10301-DPB11801 DPA10301-DPB12301 DPA10301-DPB13901 DPA10301-DPB14001 DPA10301-DPB14901 DPA10301-DPB15501 DPA10301-DPB16501 DPA10301-DPB17501 DPA10301-DPB18001 DPA10401-DPB10101 DPA10401-DPB10201 DPA10401-DPB10202 DPA10401-DPB10402 DPA10401-DPB10501 DPA10401-DPB110501 DPA10401-DPB14901
KEPPCLWTGFELIPDKWTVQ

SEQ ID NO: 6954 - protein, 14 aa, synthetic construct
  source 1..14: note = Seed: PPFLWMGYELHPDK; note = HLAs: DPA10103-DPB10101 DPA10103-DPB10201 DPA10103-DPB10202 DPA10103-DPB10401 DPA10103-DPB112601 DPA10103-DPB11501 DPA10103-DPB11601 DPA10103-DPB11901 DPA10103-DPB12301 DPA10103-DPB13101 DPA10103-DPB13401 DPA10103-DPB13901 DPA10103-DPB14001 DPA10103-DPB14101 DPA10103-DPB14801 DPA10103-DPB15001 DPA10103-DPB15901 DPA10104-DPB10101 DPA10104-DPB11501 DPA10105-DPB10101 DPA10105-DPB10401 DPA10105-DPB15001 DPA10106-DPB10101 DPA10201-DPB10101 DPA10201-DPB110601 DPA10201-DPB11501 DPA10201-DPB11601 DPA10201-DPB11901 DPA10202-DPB10101 DPA10202-DPB10201 DPA10202-DPB10202 DPA10202-DPB10401 DPA10202-DPB110601 DPA10202-DPB11901 DPA10202-DPB13101 DPA10202-DPB16501 DPA10301-DPB10101 DPA10301-DPB10201 DPA10301-DPB10202 DPA10301-DPB10401 DPA10301-DPB10402 DPA10301-DPB110501 DPA10301-DPB110601 DPA10301-DPB11801 DPA10301-DPB12301 DPA10301-DPB13901 DPA10301-DPB14001 DPA10301-DPB14901 DPA10301-DPB15501 DPA10301-DPB16501 DPA10301-DPB17501 DPA10301-DPB18001 DPA10401-DPB10101 DPA10401-DPB10201; note = HLAs: DPA10401-DPB10202 DPA10401-DPB10402 DPA10401-DPB10501 DPA10401-DPB110501 DPA10401-DPB14901
PPFLWNGLELVPDK

SEQ ID NO: 6955 - protein, 14 aa, synthetic construct
  source 1..14: note = Seed: PPFLWMGYELHPDK; note = HLAs: DRB1_1001 DPA10103-DPB10201 DPA10103-DPB10202 DPA10103-DPB10401 DPA10103-DPB112601 DPA10103-DPB11501 DPA10103-DPB12301 DPA10103-DPB13401 DPA10103-DPB13901 DPA10103-DPB14001 DPA10103-DPB14101 DPA10103-DPB14801 DPA10103-DPB15901 DPA10104-DPB11501 DPA10105-DPB10401 DPA10106-DPB10101 DPA10201-DPB10101 DPA10201-DPB110601 DPA10201-DPB11501 DPA10201-DPB11601 DPA10201-DPB11901 DPA10202-DPB10101 DPA10202-DPB10201 DPA10202-DPB10202 DPA10202-DPB10401 DPA10202-DPB110601 DPA10202-DPB11901 DPA10202-DPB13101 DPA10202-DPB16501 DPA10301-DPB10201 DPA10301-DPB10202 DPA10301-DPB10401 DPA10301-DPB10402 DPA10301-DPB110501 DPA10301-DPB110601 DPA10301-DPB11801 DPA10301-DPB12301 DPA10301-DPB13901 DPA10301-DPB14001 DPA10301-DPB14901 DPA10301-DPB15501 DPA10301-DPB17501 DPA10301-DPB18001 DPA10401-DPB10201 DPA10401-DPB10202 DPA10401-DPB10402 DPA10401-DPB10501 DPA10401-DPB110501 DPA10401-DPB14901
PPFLWLGVELLPDK

SEQ ID NO: 6956 - protein, 14 aa, synthetic construct
  source 1..14: note = Seed: PPFLWMGYELHPDK; note = HLAs: DPA10103-DPB10101 DPA10103-DPB10201 DPA10103-DPB10202 DPA10103-DPB10401 DPA10103-DPB112601 DPA10103-DPB11501 DPA10103-DPB11601 DPA10103-DPB11901 DPA10103-DPB12301 DPA10103-DPB13101 DPA10103-DPB13401 DPA10103-DPB13901 DPA10103-DPB14001 DPA10103-DPB14101 DPA10103-DPB14801 DPA10103-DPB15001 DPA10103-DPB15901 DPA10104-DPB10101 DPA10104-DPB11501 DPA10105-DPB10101 DPA10105-DPB10401 DPA10105-DPB15001 DPA10106-DPB10101 DPA10201-DPB10101 DPA10201-DPB110601 DPA10201-DPB11501 DPA10201-DPB11601 DPA10201-DPB11901 DPA10202-DPB10101 DPA10202-DPB10201 DPA10202-DPB10202 DPA10202-DPB10401 DPA10202-DPB110601 DPA10202-DPB11901 DPA10202-DPB13101 DPA10202-DPB16501 DPA10301-DPB10101 DPA10301-DPB10201 DPA10301-DPB10202 DPA10301-DPB10401 DPA10301-DPB10402 DPA10301-DPB110501 DPA10301-DPB110601 DPA10301-DPB11801 DPA10301-DPB12301 DPA10301-DPB13901 DPA10301-DPB14001 DPA10301-DPB14901 DPA10301-DPB15501 DPA10301-DPB16501 DPA10301-DPB17501 DPA10301-DPB18001 DPA10401-DPB10101 DPA10401-DPB10201; note = HLAs: DPA10401-DPB10202 DPA10401-DPB10402 DPA10401-DPB10501 DPA10401-DPB110501 DPA10401-DPB14901
PPFLWTGLELYPDK

SEQ ID NO: 6957 - protein, 20 aa, synthetic construct
  source 1..20: note = Seed: KEPPFLWMGYELHPDKWTVQ; note = HLAs: DRB1_0101 DPA10103-DPB10101 DPA10103-DPB10201 DPA10103-DPB10202 DPA10103-DPB10401 DPA10103-DPB10402 DPA10103-DPB10501 DPA10103-DPB110501 DPA10103-DPB112601 DPA10103-DPB11501 DPA10103-DPB11601 DPA10103-DPB11801 DPA10103-DPB11901 DPA10103-DPB12301 DPA10103-DPB13101 DPA10103-DPB13401 DPA10103-DPB13901 DPA10103-DPB14001 DPA10103-DPB14101 DPA10103-DPB14801 DPA10103-DPB14901 DPA10103-DPB15001 DPA10103-DPB15101 DPA10103-DPB15501 DPA10103-DPB15901 DPA10103-DPB18001 DPA10104-DPB10101 DPA10104-DPB11501 DPA10105-DPB10101 DPA10105-DPB10401 DPA10105-DPB11801 DPA10105-DPB15001 DPA10106-DPB10101 DPA10201-DPB10101 DPA10201-DPB10201 DPA10201-DPB10202 DPA10201-DPB10401 DPA10201-DPB10501 DPA10201-DPB110601 DPA10201-DPB11501 DPA10201-DPB11601 DPA10201-DPB11901 DPA10201-DPB13401 DPA10201-DPB15501 DPA10202-DPB10101 DPA10202-DPB10201 DPA10202-DPB10202 DPA10202-DPB10401 DPA10202-DPB10501 DPA10202-DPB110601 DPA10202-DPB11101 DPA10202-DPB11301 DPA10202-DPB11801 DPA10202-DPB11901 DPA10202-DPB13101; note = HLAs: DPA10202-DPB13801 DPA10202-DPB15501 DPA10202-DPB16501 DPA10301-DPB10101 DPA10301-DPB10201 DPA10301-DPB10202 DPA10301-DPB10401 DPA10301-DPB10402 DPA10301-DPB110501 DPA10301-DPB110601 DPA10301-DPB11101 DPA10301-DPB11301 DPA10301-DPB11801 DPA10301-DPB12301 DPA10301-DPB13901 DPA10301-DPB14001 DPA10301-DPB14901 DPA10301-DPB15501 DPA10301-DPB16501 DPA10301-DPB17501 DPA10301-DPB18001 DPA10401-DPB10101 DPA10401-DPB10201 DPA10401-DPB10202 DPA10401-DPB10402 DPA10401-DPB10501 DPA10401-DPB110501 DPA10401-DPB14901
KEPPFLWVGLELLPDKWTVQ

SEQ ID NO: 6958 - protein, 14 aa, synthetic construct
  source 1..14: note = Seed: PPFLWMGYELHPDK; note = HLAs: DRB1_1001 DPA10103-DPB10101 DPA10103-DPB10201 DPA10103-DPB10202 DPA10103-DPB10401 DPA10103-DPB112601 DPA10103-DPB11501 DPA10103-DPB11601 DPA10103-DPB11901 DPA10103-DPB12301 DPA10103-DPB13101 DPA10103-DPB13401 DPA10103-DPB13901 DPA10103-DPB14001 DPA10103-DPB14101 DPA10103-DPB14801 DPA10103-DPB15001 DPA10103-DPB15901 DPA10104-DPB10101 DPA10104-DPB11501 DPA10105-DPB10101 DPA10105-DPB10401 DPA10105-DPB15001 DPA10106-DPB10101 DPA10201-DPB10101 DPA10201-DPB110601 DPA10201-DPB11501 DPA10201-DPB11601 DPA10201-DPB11901 DPA10202-DPB10101 DPA10202-DPB10201 DPA10202-DPB10202 DPA10202-DPB10401 DPA10202-DPB110601 DPA10202-DPB11901 DPA10202-DPB13101 DPA10202-DPB16501 DPA10301-DPB10101 DPA10301-DPB10201 DPA10301-DPB10202 DPA10301-DPB10401 DPA10301-DPB10402 DPA10301-DPB110501 DPA10301-DPB110601 DPA10301-DPB11801 DPA10301-DPB12301 DPA10301-DPB13901 DPA10301-DPB14001 DPA10301-DPB14901 DPA10301-DPB15501 DPA10301-DPB16501 DPA10301-DPB17501 DPA10301-DPB18001 DPA10401-DPB10101 DPA10401-DPB10201; note = HLAs: DPA10401-DPB10202 DPA10401-DPB10402 DPA10401-DPB10501 DPA10401-DPB110501 DPA10401-DPB14901
PPFLWSGVELLPDK

SEQ ID NO: 6959 - protein, 14 aa, synthetic construct
  source 1..14: note = Seed: PPFLWMGYELHPDK; note = HLAs: DPA10103-DPB10101 DPA10103-DPB10201 DPA10103-DPB10202 DPA10103-DPB10401 DPA10103-DPB112601 DPA10103-DPB11501 DPA10103-DPB11601 DPA10103-DPB11901 DPA10103-DPB12301 DPA10103-DPB13101 DPA10103-DPB13401 DPA10103-DPB13901 DPA10103-DPB14001 DPA10103-DPB14101 DPA10103-DPB14801 DPA10103-DPB15001 DPA10103-DPB15901 DPA10104-DPB10101 DPA10104-DPB11501 DPA10105-DPB10101 DPA10105-DPB10401 DPA10105-DPB15001 DPA10106-DPB10101 DPA10201-DPB10101 DPA10201-DPB110601 DPA10201-DPB11501 DPA10201-DPB11601 DPA10201-DPB11901 DPA10202-DPB10101 DPA10202-DPB10201 DPA10202-DPB10202 DPA10202-DPB10401 DPA10202-DPB110601 DPA10202-DPB11901 DPA10202-DPB13101 DPA10202-DPB16501 DPA10301-DPB10101 DPA10301-DPB10201 DPA10301-DPB10202 DPA10301-DPB10401 DPA10301-DPB10402 DPA10301-DPB110501 DPA10301-DPB110601 DPA10301-DPB11801 DPA10301-DPB12301 DPA10301-DPB13901 DPA10301-DPB14001 DPA10301-DPB14901 DPA10301-DPB15501 DPA10301-DPB16501 DPA10301-DPB17501 DPA10301-DPB18001 DPA10401-DPB10101 DPA10401-DPB10201; note = HLAs: DPA10401-DPB10202 DPA10401-DPB10402 DPA10401-DPB10501 DPA10401-DPB110501 DPA10401-DPB14901
PPYLWTGFELEPDK

SEQ ID NO: 6960 - protein, 20 aa, synthetic construct
  source 1..20: note = Seed: KEPPFLWMGYELHPDKWTVQ; note = HLAs: DRB1_0101 DRB1_0405 DRB1_1001 DPA10103-DPB10101 DPA10103-DPB10201 DPA10103-DPB10202 DPA10103-DPB10401 DPA10103-DPB10402 DPA10103-DPB10501 DPA10103-DPB110501 DPA10103-DPB112601 DPA10103-DPB11501 DPA10103-DPB11601 DPA10103-DPB11801 DPA10103-DPB11901 DPA10103-DPB12301 DPA10103-DPB13101 DPA10103-DPB13401 DPA10103-DPB13901 DPA10103-DPB14001 DPA10103-DPB14101 DPA10103-DPB14801 DPA10103-DPB14901 DPA10103-DPB15001 DPA10103-DPB15101 DPA10103-DPB15501 DPA10103-DPB15901 DPA10103-DPB18001 DPA10104-DPB10101 DPA10104-DPB11501 DPA10105-DPB10101 DPA10105-DPB10401 DPA10105-DPB11801 DPA10105-DPB15001 DPA10106-DPB10101 DPA10201-DPB10101 DPA10201-DPB10201 DPA10201-DPB10202 DPA10201-DPB10401 DPA10201-DPB10501 DPA10201-DPB110601 DPA10201-DPB11501 DPA10201-DPB11601 DPA10201-DPB11901 DPA10201-DPB13401 DPA10201-DPB15501 DPA10202-DPB10101 DPA10202-DPB10201 DPA10202-DPB10202 DPA10202-DPB10401 DPA10202-DPB10501 DPA10202-DPB110601 DPA10202-DPB11101 DPA10202-DPB11301 DPA10202-DPB11801 DPA10202-DPB11901; note = HLAs: DPA10202-DPB13101 DPA10202-DPB13801 DPA10202-DPB15501 DPA10202-DPB16501 DPA10301-DPB10101 DPA10301-DPB10201 DPA10301-DPB10202 DPA10301-DPB10401 DPA10301-DPB10402 DPA10301-DPB110501 DPA10301-DPB110601 DPA10301-DPB11101 DPA10301-DPB11301 DPA10301-DPB11801 DPA10301-DPB12301 DPA10301-DPB13901 DPA10301-DPB14001 DPA10301-DPB14901 DPA10301-DPB15501 DPA10301-DPB16501 DPA10301-DPB17501 DPA10301-DPB18001 DPA10401-DPB10101 DPA10401-DPB10201 DPA10401-DPB10202 DPA10401-DPB10402 DPA10401-DPB10501 DPA10401-DPB110501 DPA10401-DPB14901
KEPPFLWQGIELVPDKWTVQ

SEQ ID NO: 6961 - protein, 14 aa, synthetic construct
  source 1..14: note = Seed: PPFLWMGYELHPDK; note = HLAs: DPA10103-DPB10101 DPA10103-DPB10201 DPA10103-DPB10202 DPA10103-DPB10401 DPA10103-DPB112601 DPA10103-DPB11501 DPA10103-DPB11601 DPA10103-DPB11901 DPA10103-DPB12301 DPA10103-DPB13101 DPA10103-DPB13401 DPA10103-DPB13901 DPA10103-DPB14001 DPA10103-DPB14101 DPA10103-DPB14801 DPA10103-DPB15001 DPA10103-DPB15901 DPA10104-DPB10101 DPA10104-DPB11501 DPA10105-DPB10101 DPA10105-DPB10401 DPA10105-DPB15001 DPA10106-DPB10101 DPA10201-DPB10101 DPA10201-DPB110601 DPA10201-DPB11501 DPA10201-DPB11601 DPA10201-DPB11901 DPA10202-DPB10101 DPA10202-DPB10201 DPA10202-DPB10202 DPA10202-DPB10401 DPA10202-DPB110601 DPA10202-DPB11901 DPA10202-DPB13101 DPA10202-DPB16501 DPA10301-DPB10101 DPA10301-DPB10201 DPA10301-DPB10202 DPA10301-DPB10401 DPA10301-DPB10402 DPA10301-DPB110501 DPA10301-DPB110601 DPA10301-DPB11801 DPA10301-DPB12301 DPA10301-DPB13901 DPA10301-DPB14001 DPA10301-DPB14901 DPA10301-DPB15501 DPA10301-DPB16501 DPA10301-DPB17501 DPA10301-DPB18001 DPA10401-DPB10101 DPA10401-DPB10201; note = HLAs: DPA10401-DPB10202 DPA10401-DPB10402 DPA10401-DPB10501 DPA10401-DPB110501 DPA10401-DPB14901
PPFLWEGMELIPDK

SEQ ID NO: 6962 - protein, 14 aa, synthetic construct
  source 1..14: note = Seed: PPFLWMGYELHPDK; note = HLAs: DRB1_1001 DPA10103-DPB10101 DPA10103-DPB10201 DPA10103-DPB10202 DPA10103-DPB10401 DPA10103-DPB112601 DPA10103-DPB11501 DPA10103-DPB11601 DPA10103-DPB11901 DPA10103-DPB12301 DPA10103-DPB13101 DPA10103-DPB13401 DPA10103-DPB13901 DPA10103-DPB14001 DPA10103-DPB14101 DPA10103-DPB14801 DPA10103-DPB15001 DPA10103-DPB15901 DPA10104-DPB10101 DPA10104-DPB11501 DPA10105-DPB10101 DPA10105-DPB10401 DPA10105-DPB15001 DPA10106-DPB10101 DPA10201-DPB10101 DPA10201-DPB110601 DPA10201-DPB11501 DPA10201-DPB11601 DPA10201-DPB11901 DPA10202-DPB10101 DPA10202-DPB10201 DPA10202-DPB10202 DPA10202-DPB10401 DPA10202-DPB110601 DPA10202-DPB11901 DPA10202-DPB13101 DPA10202-DPB16501 DPA10301-DPB10101 DPA10301-DPB10201 DPA10301-DPB10202 DPA10301-DPB10401 DPA10301-DPB10402 DPA10301-DPB110501 DPA10301-DPB110601 DPA10301-DPB11801 DPA10301-DPB12301 DPA10301-DPB13901 DPA10301-DPB14001 DPA10301-DPB14901 DPA10301-DPB15501 DPA10301-DPB16501 DPA10301-DPB17501 DPA10301-DPB18001 DPA10401-DPB10101 DPA10401-DPB10201; note = HLAs: DPA10401-DPB10202 DPA10401-DPB10402 DPA10401-DPB10501 DPA10401-DPB110501 DPA10401-DPB14901
PPFLWNGIELLPDK

SEQ ID NO: 6963 - protein, 14 aa, synthetic construct
  source 1..14: note = Seed: PPFLWMGYELHPDK; note = HLAs: DRB1_1001 DPA10103-DPB10201 DPA10103-DPB10202 DPA10103-DPB11501 DPA10103-DPB11601 DPA10103-DPB11901 DPA10103-DPB13401 DPA10103-DPB14001 DPA10103-DPB14101 DPA10103-DPB14801 DPA10104-DPB11501 DPA10201-DPB110601 DPA10201-DPB11501 DPA10201-DPB11601 DPA10201-DPB11901 DPA10202-DPB10201 DPA10202-DPB10202 DPA10202-DPB10401 DPA10202-DPB110601 DPA10202-DPB11901 DPA10202-DPB16501 DPA10301-DPB10201 DPA10301-DPB10202 DPA10301-DPB11801 DPA10301-DPB14001 DPA10301-DPB15501 DPA10401-DPB10201 DPA10401-DPB10202 DPA10401-DPB10402 DPA10401-DPB110501 DPA10401-DPB14901
PPFLWWGIELLPDK

SEQ ID NO: 6964 - protein, 20 aa, synthetic construct
  source 1..20: note = Seed: KEPPFLWMGYELHPDKWTVQ; note = HLAs: DRB1_0101 DRB1_0405 DRB1_1001 DPA10103-DPB10101 DPA10103-DPB10201 DPA10103-DPB10202 DPA10103-DPB10401 DPA10103-DPB10402 DPA10103-DPB10501 DPA10103-DPB110501 DPA10103-DPB112601 DPA10103-DPB11501 DPA10103-DPB11601 DPA10103-DPB11801 DPA10103-DPB11901 DPA10103-DPB12301 DPA10103-DPB13101 DPA10103-DPB13401 DPA10103-DPB13901 DPA10103-DPB14001 DPA10103-DPB14101 DPA10103-DPB14801 DPA10103-DPB14901 DPA10103-DPB15001 DPA10103-DPB15101 DPA10103-DPB15501 DPA10103-DPB15901 DPA10103-DPB18001 DPA10104-DPB10101 DPA10104-DPB11501 DPA10105-DPB10101 DPA10105-DPB10401 DPA10105-DPB11801 DPA10105-DPB15001 DPA10106-DPB10101 DPA10201-DPB10101 DPA10201-DPB10201 DPA10201-DPB10202 DPA10201-DPB10401 DPA10201-DPB10501 DPA10201-DPB110601 DPA10201-DPB11501 DPA10201-DPB11601 DPA10201-DPB11901 DPA10201-DPB13401 DPA10201-DPB15501 DPA10202-DPB10101 DPA10202-DPB10201 DPA10202-DPB10202 DPA10202-DPB10401 DPA10202-DPB10501 DPA10202-DPB110601 DPA10202-DPB11101 DPA10202-DPB11301 DPA10202-DPB11801 DPA10202-DPB11901; note = HLAs: DPA10202-DPB13101 DPA10202-DPB13801 DPA10202-DPB15501 DPA10202-DPB16501 DPA10301-DPB10101 DPA10301-DPB10201 DPA10301-DPB10202 DPA10301-DPB10401 DPA10301-DPB10402 DPA10301-DPB110501 DPA10301-DPB110601 DPA10301-DPB11101 DPA10301-DPB11301 DPA10301-DPB11801 DPA10301-DPB12301 DPA10301-DPB13901 DPA10301-DPB14001 DPA10301-DPB14901 DPA10301-DPB15501 DPA10301-DPB16501 DPA10301-DPB17501 DPA10301-DPB18001 DPA10401-DPB10101 DPA10401-DPB10201 DPA10401-DPB10202 DPA10401-DPB10402 DPA10401-DPB10501 DPA10401-DPB110501 DPA10401-DPB14901
KEPPFLWSGIELMPDKWTVQ

SEQ ID NO: 6965 - protein, 14 aa, synthetic construct
  source 1..14: note = Seed: PPFLWMGYELHPDK; note = HLAs: DPA10103-DPB10101 DPA10103-DPB10201 DPA10103-DPB10202 DPA10103-DPB10401 DPA10103-DPB112601 DPA10103-DPB11501 DPA10103-DPB11601 DPA10103-DPB11901 DPA10103-DPB12301 DPA10103-DPB13101 DPA10103-DPB13401 DPA10103-DPB13901 DPA10103-DPB14001 DPA10103-DPB14101 DPA10103-DPB14801 DPA10103-DPB15001 DPA10103-DPB15901 DPA10104-DPB10101 DPA10104-DPB11501 DPA10105-DPB10101 DPA10105-DPB10401 DPA10105-DPB15001 DPA10106-DPB10101 DPA10201-DPB10101 DPA10201-DPB110601 DPA10201-DPB11501 DPA10201-DPB11601 DPA10201-DPB11901 DPA10202-DPB10101 DPA10202-DPB10201 DPA10202-DPB10202 DPA10202-DPB10401 DPA10202-DPB110601 DPA10202-DPB11901 DPA10202-DPB13101 DPA10202-DPB16501 DPA10301-DPB10101 DPA10301-DPB10201 DPA10301-DPB10202 DPA10301-DPB10401 DPA10301-DPB10402 DPA10301-DPB110501 DPA10301-DPB110601 DPA10301-DPB11801 DPA10301-DPB12301 DPA10301-DPB13901 DPA10301-DPB14001 DPA10301-DPB14901 DPA10301-DPB15501 DPA10301-DPB16501 DPA10301-DPB17501 DPA10301-DPB18001 DPA10401-DPB10101 DPA10401-DPB10201; note = HLAs: DPA10401-DPB10202 DPA10401-DPB10402 DPA10401-DPB10501 DPA10401-DPB110501 DPA10401-DPB14901
PPFLWVGFELKPDK

SEQ ID NO: 6966 - protein, 20 aa, synthetic construct
  source 1..20: note = Seed: KEPPFLWMGYELHPDKWTVQ; note = HLAs: DPA10103-DPB10101 DPA10103-DPB10201 DPA10103-DPB10202 DPA10103-DPB10401 DPA10103-DPB10402 DPA10103-DPB10501 DPA10103-DPB110501 DPA10103-DPB112601 DPA10103-DPB11501 DPA10103-DPB11601 DPA10103-DPB11801 DPA10103-DPB11901 DPA10103-DPB12301 DPA10103-DPB13101 DPA10103-DPB13401 DPA10103-DPB13901 DPA10103-DPB14001 DPA10103-DPB14101 DPA10103-DPB14801 DPA10103-DPB14901 DPA10103-DPB15001 DPA10103-DPB15101 DPA10103-DPB15501 DPA10103-DPB15901 DPA10103-DPB18001 DPA10104-DPB10101 DPA10104-DPB11501 DPA10105-DPB10101 DPA10105-DPB10401 DPA10105-DPB11801 DPA10105-DPB15001 DPA10106-DPB10101 DPA10201-DPB10101 DPA10201-DPB10201 DPA10201-DPB10202 DPA10201-DPB10401 DPA10201-DPB10501 DPA10201-DPB110601 DPA10201-DPB11501 DPA10201-DPB11601 DPA10201-DPB11901 DPA10201-DPB13401 DPA10201-DPB15501 DPA10202-DPB10101 DPA10202-DPB10201 DPA10202-DPB10202 DPA10202-DPB10401 DPA10202-DPB10501 DPA10202-DPB110601 DPA10202-DPB11101 DPA10202-DPB11301 DPA10202-DPB11801 DPA10202-DPB11901 DPA10202-DPB13101 DPA10202-DPB13801; note = HLAs: DPA10202-DPB15501 DPA10202-DPB16501 DPA10301-DPB10101 DPA10301-DPB10201 DPA10301-DPB10202 DPA10301-DPB10401 DPA10301-DPB10402 DPA10301-DPB110501 DPA10301-DPB110601 DPA10301-DPB11101 DPA10301-DPB11301 DPA10301-DPB11801 DPA10301-DPB12301 DPA10301-DPB13901 DPA10301-DPB14001 DPA10301-DPB14901 DPA10301-DPB15501 DPA10301-DPB16501 DPA10301-DPB17501 DPA10301-DPB18001 DPA10401-DPB10101 DPA10401-DPB10201 DPA10401-DPB10202 DPA10401-DPB10402 DPA10401-DPB10501 DPA10401-DPB110501 DPA10401-DPB14901
KEPPWLWVGFELMPDKWTVQ

SEQ ID NO: 6967 - protein, 14 aa, synthetic construct
  source 1..14: note = Seed: PPFLWMGYELHPDK; note = HLAs: DPA10103-DPB10101 DPA10103-DPB10201 DPA10103-DPB10202 DPA10103-DPB10401 DPA10103-DPB112601 DPA10103-DPB11501 DPA10103-DPB11601 DPA10103-DPB11901 DPA10103-DPB12301 DPA10103-DPB13101 DPA10103-DPB13401 DPA10103-DPB13901 DPA10103-DPB14001 DPA10103-DPB14101 DPA10103-DPB14801 DPA10103-DPB15001 DPA10103-DPB15901 DPA10104-DPB10101 DPA10104-DPB11501 DPA10105-DPB10101 DPA10105-DPB10401 DPA10105-DPB15001 DPA10106-DPB10101 DPA10201-DPB10101 DPA10201-DPB110601 DPA10201-DPB11501 DPA10201-DPB11601 DPA10201-DPB11901 DPA10202-DPB10101 DPA10202-DPB10201 DPA10202-DPB10202 DPA10202-DPB10401 DPA10202-DPB110601 DPA10202-DPB11901 DPA10202-DPB13101 DPA10202-DPB16501 DPA10301-DPB10101 DPA10301-DPB10201 DPA10301-DPB10202 DPA10301-DPB10401 DPA10301-DPB10402 DPA10301-DPB110501 DPA10301-DPB110601 DPA10301-DPB11801 DPA10301-DPB12301 DPA10301-DPB13901 DPA10301-DPB14001 DPA10301-DPB14901 DPA10301-DPB15501 DPA10301-DPB16501 DPA10301-DPB17501 DPA10301-DPB18001 DPA10401-DPB10101 DPA10401-DPB10201; note = HLAs: DPA10401-DPB10202 DPA10401-DPB10402 DPA10401-DPB10501 DPA10401-DPB110501 DPA10401-DPB14901
PPFLWIGMELIPDK

SEQ ID NO: 6968 - protein, 14 aa, synthetic construct
  source 1..14: note = Seed: PPFLWMGYELHPDK; note = HLAs: DPA10103-DPB10101 DPA10103-DPB10201 DPA10103-DPB10202 DPA10103-DPB10401 DPA10103-DPB112601 DPA10103-DPB11501 DPA10103-DPB11601 DPA10103-DPB11901 DPA10103-DPB12301 DPA10103-DPB13101 DPA10103-DPB13401 DPA10103-DPB13901 DPA10103-DPB14001 DPA10103-DPB14101 DPA10103-DPB14801 DPA10103-DPB15001 DPA10103-DPB15901 DPA10104-DPB10101 DPA10104-DPB11501 DPA10105-DPB10101 DPA10105-DPB10401 DPA10105-DPB15001 DPA10106-DPB10101 DPA10201-DPB10101 DPA10201-DPB110601 DPA10201-DPB11501 DPA10201-DPB11601 DPA10201-DPB11901 DPA10202-DPB10101 DPA10202-DPB10201 DPA10202-DPB10202 DPA10202-DPB10401 DPA10202-DPB110601 DPA10202-DPB11901 DPA10202-DPB13101 DPA10202-DPB16501 DPA10301-DPB10101 DPA10301-DPB10201 DPA10301-DPB10202 DPA10301-DPB10401 DPA10301-DPB10402 DPA10301-DPB110501 DPA10301-DPB110601 DPA10301-DPB11801 DPA10301-DPB12301 DPA10301-DPB13901 DPA10301-DPB14001 DPA10301-DPB14901 DPA10301-DPB15501 DPA10301-DPB16501 DPA10301-DPB17501 DPA10301-DPB18001 DPA10401-DPB10101 DPA10401-DPB10201; note = HLAs: DPA10401-DPB10202 DPA10401-DPB10402 DPA10401-DPB10501 DPA10401-DPB110501 DPA10401-DPB14901
PPILWTGFELEPDK

SEQ ID NO: 6969 - protein, 14 aa, synthetic construct
  source 1..14: note = Seed: PPFLWMGYELHPDK; note = HLAs: DRB1_1001 DPA10103-DPB10101 DPA10103-DPB10201 DPA10103-DPB10202 DPA10103-DPB10401 DPA10103-DPB112601 DPA10103-DPB11501 DPA10103-DPB11601 DPA10103-DPB11901 DPA10103-DPB12301 DPA10103-DPB13101 DPA10103-DPB13401 DPA10103-DPB13901 DPA10103-DPB14001 DPA10103-DPB14101 DPA10103-DPB14801 DPA10103-DPB15001 DPA10103-DPB15901 DPA10104-DPB10101 DPA10104-DPB11501 DPA10105-DPB10101 DPA10105-DPB10401 DPA10105-DPB15001 DPA10106-DPB10101 DPA10201-DPB10101 DPA10201-DPB110601 DPA10201-DPB11501 DPA10201-DPB11601 DPA10201-DPB11901 DPA10202-DPB10101 DPA10202-DPB10201 DPA10202-DPB10202 DPA10202-DPB10401 DPA10202-DPB110601 DPA10202-DPB11901 DPA10202-DPB13101 DPA10202-DPB16501 DPA10301-DPB10101 DPA10301-DPB10201 DPA10301-DPB10202 DPA10301-DPB10401 DPA10301-DPB10402 DPA10301-DPB110501 DPA10301-DPB110601 DPA10301-DPB11801 DPA10301-DPB12301 DPA10301-DPB13901 DPA10301-DPB14001 DPA10301-DPB14901 DPA10301-DPB15501 DPA10301-DPB16501 DPA10301-DPB17501 DPA10301-DPB18001 DPA10401-DPB10101 DPA10401-DPB10201; note = HLAs: DPA10401-DPB10202 DPA10401-DPB10402 DPA10401-DPB10501 DPA10401-DPB110501 DPA10401-DPB14901
PPFLWQGIELIPDK

SEQ ID NO: 6970 - protein, 14 aa, synthetic construct
  source 1..14: note = Seed: PPFLWMGYELHPDK; note = HLAs: DPA10103-DPB10101 DPA10103-DPB10201 DPA10103-DPB10202 DPA10103-DPB10401 DPA10103-DPB112601 DPA10103-DPB11501 DPA10103-DPB11601 DPA10103-DPB11901 DPA10103-DPB12301 DPA10103-DPB13101 DPA10103-DPB13401 DPA10103-DPB13901 DPA10103-DPB14001 DPA10103-DPB14101 DPA10103-DPB14801 DPA10103-DPB15001 DPA10103-DPB15901 DPA10104-DPB10101 DPA10104-DPB11501 DPA10105-DPB10101 DPA10105-DPB10401 DPA10105-DPB15001 DPA10106-DPB10101 DPA10201-DPB10101 DPA10201-DPB110601 DPA10201-DPB11501 DPA10201-DPB11601 DPA10201-DPB11901 DPA10202-DPB10101 DPA10202-DPB10201 DPA10202-DPB10202 DPA10202-DPB10401 DPA10202-DPB110601 DPA10202-DPB11901 DPA10202-DPB13101 DPA10202-DPB16501 DPA10301-DPB10101 DPA10301-DPB10201 DPA10301-DPB10202 DPA10301-DPB10401 DPA10301-DPB10402 DPA10301-DPB110501 DPA10301-DPB110601 DPA10301-DPB11801 DPA10301-DPB12301 DPA10301-DPB13901 DPA10301-DPB14001 DPA10301-DPB14901 DPA10301-DPB15501 DPA10301-DPB16501 DPA10301-DPB17501 DPA10301-DPB18001 DPA10401-DPB10101 DPA10401-DPB10201; note = HLAs: DPA10401-DPB10202 DPA10401-DPB10402 DPA10401-DPB10501 DPA10401-DPB110501 DPA10401-DPB14901
PPILWNGFELFPDK

SEQ ID NO: 6971 - protein, 20 aa, synthetic construct
  source 1..20: note = Seed: KEPPFLWMGYELHPDKWTVQ; note = HLAs: DPA10103-DPB10101 DPA10103-DPB10201 DPA10103-DPB10202 DPA10103-DPB10401 DPA10103-DPB10402 DPA10103-DPB10501 DPA10103-DPB110501 DPA10103-DPB112601 DPA10103-DPB11501 DPA10103-DPB11601 DPA10103-DPB11801 DPA10103-DPB11901 DPA10103-DPB12301 DPA10103-DPB13101 DPA10103-DPB13401 DPA10103-DPB13901 DPA10103-DPB14001 DPA10103-DPB14101 DPA10103-DPB14801 DPA10103-DPB14901 DPA10103-DPB15001 DPA10103-DPB15101 DPA10103-DPB15501 DPA10103-DPB15901 DPA10103-DPB18001 DPA10104-DPB10101 DPA10104-DPB11501 DPA10105-DPB10101 DPA10105-DPB10401 DPA10105-DPB11801 DPA10105-DPB15001 DPA10106-DPB10101 DPA10201-DPB10101 DPA10201-DPB10201 DPA10201-DPB10202 DPA10201-DPB10401 DPA10201-DPB10501 DPA10201-DPB110601 DPA10201-DPB11501 DPA10201-DPB11601 DPA10201-DPB11901 DPA10201-DPB13401 DPA10201-DPB15501 DPA10202-DPB10101 DPA10202-DPB10201 DPA10202-DPB10202 DPA10202-DPB10401 DPA10202-DPB10501 DPA10202-DPB110601 DPA10202-DPB11101 DPA10202-DPB11301 DPA10202-DPB11801 DPA10202-DPB11901 DPA10202-DPB13101 DPA10202-DPB13801; note = HLAs: DPA10202-DPB15501 DPA10202-DPB16501 DPA10301-DPB10101 DPA10301-DPB10201 DPA10301-DPB10202 DPA10301-DPB10401 DPA10301-DPB10402 DPA10301-DPB110501 DPA10301-DPB110601 DPA10301-DPB11101 DPA10301-DPB11301 DPA10301-DPB11801 DPA10301-DPB12301 DPA10301-DPB13901 DPA10301-DPB14001 DPA10301-DPB14901 DPA10301-DPB15501 DPA10301-DPB16501 DPA10301-DPB17501 DPA10301-DPB18001 DPA10401-DPB10101 DPA10401-DPB10201 DPA10401-DPB10202 DPA10401-DPB10402 DPA10401-DPB10501 DPA10401-DPB110501 DPA10401-DPB14901
KEPPILWEGFELFPDKWTVQ

SEQ ID NO: 6972 - protein, 14 aa, synthetic construct
  source 1..14: note = Seed: PPFLWMGYELHPDK; note = HLAs: DPA10103-DPB10101 DPA10103-DPB10201 DPA10103-DPB10202 DPA10103-DPB10401 DPA10103-DPB112601 DPA10103-DPB11501 DPA10103-DPB11601 DPA10103-DPB11901 DPA10103-DPB12301 DPA10103-DPB13101 DPA10103-DPB13401 DPA10103-DPB13901 DPA10103-DPB14001 DPA10103-DPB14101 DPA10103-DPB14801 DPA10103-DPB15001 DPA10103-DPB15901 DPA10104-DPB10101 DPA10104-DPB11501 DPA10105-DPB10101 DPA10105-DPB10401 DPA10105-DPB15001 DPA10106-DPB10101 DPA10201-DPB10101 DPA10201-DPB110601 DPA10201-DPB11501 DPA10201-DPB11601 DPA10201-DPB11901 DPA10202-DPB10101 DPA10202-DPB10201 DPA10202-DPB10202 DPA10202-DPB10401 DPA10202-DPB110601 DPA10202-DPB11901 DPA10202-DPB13101 DPA10202-DPB16501 DPA10301-DPB10101 DPA10301-DPB10201 DPA10301-DPB10202 DPA10301-DPB10401 DPA10301-DPB10402 DPA10301-DPB110501 DPA10301-DPB110601 DPA10301-DPB11801 DPA10301-DPB12301 DPA10301-DPB13901 DPA10301-DPB14001 DPA10301-DPB14901 DPA10301-DPB15501 DPA10301-DPB16501 DPA10301-DPB17501 DPA10301-DPB18001 DPA10401-DPB10101 DPA10401-DPB10201; note = HLAs: DPA10401-DPB10202 DPA10401-DPB10402 DPA10401-DPB10501 DPA10401-DPB110501 DPA10401-DPB14901
PPYLWEGFELTPDK

SEQ ID NO: 6973 - protein, 20 aa, synthetic construct
  source 1..20: note = Seed: KEPPFLWMGYELHPDKWTVQ; note = HLAs: DRB1_0101 DRB1_1001 DPA10103-DPB10201 DPA10103-DPB10202 DPA10103-DPB10401 DPA10103-DPB10402 DPA10103-DPB10501 DPA10103-DPB110501 DPA10103-DPB112601 DPA10103-DPB11501 DPA10103-DPB11601 DPA10103-DPB11801 DPA10103-DPB11901 DPA10103-DPB12301 DPA10103-DPB13401 DPA10103-DPB13901 DPA10103-DPB14001 DPA10103-DPB14101 DPA10103-DPB14801 DPA10103-DPB14901 DPA10103-DPB15101 DPA10103-DPB15501 DPA10103-DPB15901 DPA10103-DPB18001 DPA10104-DPB11501 DPA10105-DPB10401 DPA10105-DPB11801 DPA10106-DPB10101 DPA10201-DPB10101 DPA10201-DPB10201 DPA10201-DPB10202 DPA10201-DPB10401 DPA10201-DPB10501 DPA10201-DPB110601 DPA10201-DPB11501 DPA10201-DPB11601 DPA10201-DPB11901 DPA10201-DPB13401 DPA10201-DPB15501 DPA10202-DPB10101 DPA10202-DPB10201 DPA10202-DPB10202 DPA10202-DPB10401 DPA10202-DPB10501 DPA10202-DPB110601 DPA10202-DPB11301 DPA10202-DPB11801 DPA10202-DPB11901 DPA10202-DPB13101 DPA10202-DPB13801 DPA10202-DPB15501 DPA10202-DPB16501 DPA10301-DPB10101 DPA10301-DPB10201 DPA10301-DPB10202; note = HLAs: DPA10301-DPB10401 DPA10301-DPB10402 DPA10301-DPB110501 DPA10301-DPB110601 DPA10301-DPB11301 DPA10301-DPB11801 DPA10301-DPB12301 DPA10301-DPB13901 DPA10301-DPB14001 DPA10301-DPB14901 DPA10301-DPB15501 DPA10301-DPB17501 DPA10301-DPB18001 DPA10401-DPB10201 DPA10401-DPB10202 DPA10401-DPB10402 DPA10401-DPB110501 DPA10401-DPB14901
KEPPFLWFGIELLPDKWTVQ

SEQ ID NO: 6974 - protein, 20 aa, synthetic construct
  source 1..20: note = Seed: KEPPFLWMGYELHPDKWTVQ; note = HLAs: DPA10103-DPB10101 DPA10103-DPB10201 DPA10103-DPB10202 DPA10103-DPB10401 DPA10103-DPB10402 DPA10103-DPB10501 DPA10103-DPB110501 DPA10103-DPB112601 DPA10103-DPB11501 DPA10103-DPB11601 DPA10103-DPB11801 DPA10103-DPB11901 DPA10103-DPB12301 DPA10103-DPB13101 DPA10103-DPB13401 DPA10103-DPB13901 DPA10103-DPB14001 DPA10103-DPB14101 DPA10103-DPB14801 DPA10103-DPB14901 DPA10103-DPB15001 DPA10103-DPB15101 DPA10103-DPB15501 DPA10103-DPB15901 DPA10103-DPB18001 DPA10104-DPB10101 DPA10104-DPB11501 DPA10105-DPB10101 DPA10105-DPB10401 DPA10105-DPB11801 DPA10105-DPB15001 DPA10106-DPB10101 DPA10201-DPB10101 DPA10201-DPB10201 DPA10201-DPB10202 DPA10201-DPB10401 DPA10201-DPB10501 DPA10201-DPB110601 DPA10201-DPB11501 DPA10201-DPB11601 DPA10201-DPB11901 DPA10201-DPB13401 DPA10201-DPB15501 DPA10202-DPB10101 DPA10202-DPB10201 DPA10202-DPB10202 DPA10202-DPB10401 DPA10202-DPB10501 DPA10202-DPB110601 DPA10202-DPB11101 DPA10202-DPB11301 DPA10202-DPB11801 DPA10202-DPB11901 DPA10202-DPB13101 DPA10202-DPB13801; note = HLAs: DPA10202-DPB15501 DPA10202-DPB16501 DPA10301-DPB10101 DPA10301-DPB10201 DPA10301-DPB10202 DPA10301-DPB10401 DPA10301-DPB10402 DPA10301-DPB110501 DPA10301-DPB110601 DPA10301-DPB11101 DPA10301-DPB11301 DPA10301-DPB11801 DPA10301-DPB12301 DPA10301-DPB13901 DPA10301-DPB14001 DPA10301-DPB14901 DPA10301-DPB15501 DPA10301-DPB16501 DPA10301-DPB17501 DPA10301-DPB18001 DPA10401-DPB10101 DPA10401-DPB10201 DPA10401-DPB10202 DPA10401-DPB10402 DPA10401-DPB10501 DPA10401-DPB110501 DPA10401-DPB14901
KEPPILWTGWELVPDKWTVQ

SEQ ID NO: 6975 - protein, 14 aa, synthetic construct
  source 1..14: note = Seed: PPFLWMGYELHPDK; note = HLAs: DPA10103-DPB10101 DPA10103-DPB10201 DPA10103-DPB10202 DPA10103-DPB10401 DPA10103-DPB112601 DPA10103-DPB11501 DPA10103-DPB11601 DPA10103-DPB11901 DPA10103-DPB12301 DPA10103-DPB13101 DPA10103-DPB13401 DPA10103-DPB13901 DPA10103-DPB14001 DPA10103-DPB14101 DPA10103-DPB14801 DPA10103-DPB15001 DPA10103-DPB15901 DPA10104-DPB10101 DPA10104-DPB11501 DPA10105-DPB10101 DPA10105-DPB10401 DPA10105-DPB15001 DPA10106-DPB10101 DPA10201-DPB10101 DPA10201-DPB110601 DPA10201-DPB11501 DPA10201-DPB11601 DPA10201-DPB11901 DPA10202-DPB10101 DPA10202-DPB10201 DPA10202-DPB10202 DPA10202-DPB10401 DPA10202-DPB110601 DPA10202-DPB11901 DPA10202-DPB13101 DPA10202-DPB16501 DPA10301-DPB10101 DPA10301-DPB10201 DPA10301-DPB10202 DPA10301-DPB10401 DPA10301-DPB10402 DPA10301-DPB110501 DPA10301-DPB110601 DPA10301-DPB11801 DPA10301-DPB12301 DPA10301-DPB13901 DPA10301-DPB14001 DPA10301-DPB14901 DPA10301-DPB15501 DPA10301-DPB16501 DPA10301-DPB17501 DPA10301-DPB18001 DPA10401-DPB10101 DPA10401-DPB10201; note = HLAs: DPA10401-DPB10202 DPA10401-DPB10402 DPA10401-DPB10501 DPA10401-DPB110501 DPA10401-DPB14901
PPFLWEGFELDPDK

SEQ ID NO: 6976 - protein, 14 aa, synthetic construct
  source 1..14: note = Seed: PPFLWMGYELHPDK; note = HLAs: DPA10103-DPB10101 DPA10103-DPB10201 DPA10103-DPB10202 DPA10103-DPB10401 DPA10103-DPB112601 DPA10103-DPB11501 DPA10103-DPB11601 DPA10103-DPB11901 DPA10103-DPB12301 DPA10103-DPB13101 DPA10103-DPB13401 DPA10103-DPB13901 DPA10103-DPB14001 DPA10103-DPB14101 DPA10103-DPB14801 DPA10103-DPB15001 DPA10103-DPB15901 DPA10104-DPB10101 DPA10104-DPB11501 DPA10105-DPB10101 DPA10105-DPB10401 DPA10105-DPB15001 DPA10106-DPB10101 DPA10201-DPB10101 DPA10201-DPB110601 DPA10201-DPB11501 DPA10201-DPB11601 DPA10201-DPB11901 DPA10202-DPB10101 DPA10202-DPB10201 DPA10202-DPB10202 DPA10202-DPB10401 DPA10202-DPB110601 DPA10202-DPB11901 DPA10202-DPB13101 DPA10202-DPB16501 DPA10301-DPB10101 DPA10301-DPB10201 DPA10301-DPB10202 DPA10301-DPB10401 DPA10301-DPB10402 DPA10301-DPB110501 DPA10301-DPB110601 DPA10301-DPB11801 DPA10301-DPB12301 DPA10301-DPB13901 DPA10301-DPB14001 DPA10301-DPB14901 DPA10301-DPB15501 DPA10301-DPB16501 DPA10301-DPB17501 DPA10301-DPB18001 DPA10401-DPB10101 DPA10401-DPB10201; note = HLAs: DPA10401-DPB10202 DPA10401-DPB10402 DPA10401-DPB10501 DPA10401-DPB110501 DPA10401-DPB14901
PPILWFGFELVPDK

SEQ ID NO: 6977 - protein, 14 aa, synthetic construct
  source 1..14: note = Seed: PPFLWMGYELHPDK; note = HLAs: DPA10103-DPB10101 DPA10103-DPB10201 DPA10103-DPB10202 DPA10103-DPB10401 DPA10103-DPB112601 DPA10103-DPB11501 DPA10103-DPB11601 DPA10103-DPB11901 DPA10103-DPB12301 DPA10103-DPB13101 DPA10103-DPB13401 DPA10103-DPB13901 DPA10103-DPB14001 DPA10103-DPB14101 DPA10103-DPB14801 DPA10103-DPB15001 DPA10103-DPB15901 DPA10104-DPB10101 DPA10104-DPB11501 DPA10105-DPB10101 DPA10105-DPB10401 DPA10105-DPB15001 DPA10106-DPB10101 DPA10201-DPB10101 DPA10201-DPB110601 DPA10201-DPB11501 DPA10201-DPB11601 DPA10201-DPB11901 DPA10202-DPB10101 DPA10202-DPB10201 DPA10202-DPB10202 DPA10202-DPB10401 DPA10202-DPB110601 DPA10202-DPB11901 DPA10202-DPB13101 DPA10202-DPB16501 DPA10301-DPB10101 DPA10301-DPB10201 DPA10301-DPB10202 DPA10301-DPB10401 DPA10301-DPB10402 DPA10301-DPB110501 DPA10301-DPB110601 DPA10301-DPB11801 DPA10301-DPB12301 DPA10301-DPB13901 DPA10301-DPB14001 DPA10301-DPB14901 DPA10301-DPB15501 DPA10301-DPB16501 DPA10301-DPB17501 DPA10301-DPB18001 DPA10401-DPB10101 DPA10401-DPB10201; note = HLAs: DPA10401-DPB10202 DPA10401-DPB10402 DPA10401-DPB10501 DPA10401-DPB110501 DPA10401-DPB14901
PPFLWEGLELFPDK

SEQ ID NO: 6978 - protein, 20 aa, synthetic construct
  source 1..20: note = Seed: KEPPFLWMGYELHPDKWTVQ; note = HLAs: DRB1_1001 DPA10103-DPB10101 DPA10103-DPB10201 DPA10103-DPB10202 DPA10103-DPB10401 DPA10103-DPB10402 DPA10103-DPB10501 DPA10103-DPB110501 DPA10103-DPB112601 DPA10103-DPB11501 DPA10103-DPB11601 DPA10103-DPB11801 DPA10103-DPB11901 DPA10103-DPB12301 DPA10103-DPB13101 DPA10103-DPB13401 DPA10103-DPB13901 DPA10103-DPB14001 DPA10103-DPB14101 DPA10103-DPB14801 DPA10103-DPB14901 DPA10103-DPB15001 DPA10103-DPB15101 DPA10103-DPB15501 DPA10103-DPB15901 DPA10103-DPB18001 DPA10104-DPB10101 DPA10104-DPB11501 DPA10105-DPB10101 DPA10105-DPB10401 DPA10105-DPB11801 DPA10105-DPB15001 DPA10106-DPB10101 DPA10201-DPB10101 DPA10201-DPB10201 DPA10201-DPB10202 DPA10201-DPB10401 DPA10201-DPB10501 DPA10201-DPB110601 DPA10201-DPB11501 DPA10201-DPB11601 DPA10201-DPB11901 DPA10201-DPB13401 DPA10201-DPB15501 DPA10202-DPB10101 DPA10202-DPB10201 DPA10202-DPB10202 DPA10202-DPB10401 DPA10202-DPB10501 DPA10202-DPB110601 DPA10202-DPB11101 DPA10202-DPB11301 DPA10202-DPB11801 DPA10202-DPB11901 DPA10202-DPB13101; note = HLAs: DPA10202-DPB13801 DPA10202-DPB15501 DPA10202-DPB16501 DPA10301-DPB10101 DPA10301-DPB10201 DPA10301-DPB10202 DPA10301-DPB10401 DPA10301-DPB10402 DPA10301-DPB110501 DPA10301-DPB110601 DPA10301-DPB11101 DPA10301-DPB11301 DPA10301-DPB11801 DPA10301-DPB12301 DPA10301-DPB13901 DPA10301-DPB14001 DPA10301-DPB14901 DPA10301-DPB15501 DPA10301-DPB16501 DPA10301-DPB17501 DPA10301-DPB18001 DPA10401-DPB10101 DPA10401-DPB10201 DPA10401-DPB10202 DPA10401-DPB10402 DPA10401-DPB10501 DPA10401-DPB110501 DPA10401-DPB14901
KEPPFLWDGFELSPDKWTVQ

SEQ ID NO: 6979 - protein, 14 aa, synthetic construct
  source 1..14: note = Seed: PPFLWMGYELHPDK; note = HLAs: DPA10103-DPB10101 DPA10103-DPB10201 DPA10103-DPB10202 DPA10103-DPB10401 DPA10103-DPB112601 DPA10103-DPB11501 DPA10103-DPB11601 DPA10103-DPB11901 DPA10103-DPB12301 DPA10103-DPB13101 DPA10103-DPB13401 DPA10103-DPB13901 DPA10103-DPB14001 DPA10103-DPB14101 DPA10103-DPB14801 DPA10103-DPB15001 DPA10103-DPB15901 DPA10104-DPB10101 DPA10104-DPB11501 DPA10105-DPB10101 DPA10105-DPB10401 DPA10105-DPB15001 DPA10106-DPB10101 DPA10201-DPB10101 DPA10201-DPB110601 DPA10201-DPB11501 DPA10201-DPB11601 DPA10201-DPB11901 DPA10202-DPB10101 DPA10202-DPB10201 DPA10202-DPB10202 DPA10202-DPB10401 DPA10202-DPB110601 DPA10202-DPB11901 DPA10202-DPB13101 DPA10202-DPB16501 DPA10301-DPB10101 DPA10301-DPB10201 DPA10301-DPB10202 DPA10301-DPB10401 DPA10301-DPB10402 DPA10301-DPB110501 DPA10301-DPB110601 DPA10301-DPB11801 DPA10301-DPB12301 DPA10301-DPB13901 DPA10301-DPB14001 DPA10301-DPB14901 DPA10301-DPB15501 DPA10301-DPB16501 DPA10301-DPB17501 DPA10301-DPB18001 DPA10401-DPB10101 DPA10401-DPB10201; note = HLAs: DPA10401-DPB10202 DPA10401-DPB10402 DPA10401-DPB10501 DPA10401-DPB110501 DPA10401-DPB14901
PPFLWNGFELEPDK

SEQ ID NO: 6980 - protein, 20 aa, synthetic construct
  source 1..20: note = Seed: KEPPFLWMGYELHPDKWTVQ; note = HLAs: DRB1_0101 DRB1_1001 DPA10103-DPB10101 DPA10103-DPB10201 DPA10103-DPB10202 DPA10103-DPB10401 DPA10103-DPB10402 DPA10103-DPB10501 DPA10103-DPB110501 DPA10103-DPB112601 DPA10103-DPB11501 DPA10103-DPB11601 DPA10103-DPB11801 DPA10103-DPB11901 DPA10103-DPB12301 DPA10103-DPB13101 DPA10103-DPB13401 DPA10103-DPB13901 DPA10103-DPB14001 DPA10103-DPB14101 DPA10103-DPB14801 DPA10103-DPB14901 DPA10103-DPB15001 DPA10103-DPB15101 DPA10103-DPB15501 DPA10103-DPB15901 DPA10103-DPB18001 DPA10104-DPB10101 DPA10104-DPB11501 DPA10105-DPB10101 DPA10105-DPB10401 DPA10105-DPB11801 DPA10105-DPB15001 DPA10106-DPB10101 DPA10201-DPB10101 DPA10201-DPB10201 DPA10201-DPB10202 DPA10201-DPB10401 DPA10201-DPB10501 DPA10201-DPB110601 DPA10201-DPB11501 DPA10201-DPB11601 DPA10201-DPB11901 DPA10201-DPB13401 DPA10201-DPB15501 DPA10202-DPB10101 DPA10202-DPB10201 DPA10202-DPB10202 DPA10202-DPB10401 DPA10202-DPB10501 DPA10202-DPB110601 DPA10202-DPB11101 DPA10202-DPB11301 DPA10202-DPB11801 DPA10202-DPB11901; note = HLAs: DPA10202-DPB13101 DPA10202-DPB13801 DPA10202-DPB15501 DPA10202-DPB16501 DPA10301-DPB10101 DPA10301-DPB10201 DPA10301-DPB10202 DPA10301-DPB10401 DPA10301-DPB10402 DPA10301-DPB110501 DPA10301-DPB110601 DPA10301-DPB11101 DPA10301-DPB11301 DPA10301-DPB11801 DPA10301-DPB12301 DPA10301-DPB13901 DPA10301-DPB14001 DPA10301-DPB14901 DPA10301-DPB15501 DPA10301-DPB16501 DPA10301-DPB17501 DPA10301-DPB18001 DPA10401-DPB10101 DPA10401-DPB10201 DPA10401-DPB10202 DPA10401-DPB10402 DPA10401-DPB10501 DPA10401-DPB110501 DPA10401-DPB14901
KEPPFLWIGIELVPDKWTVQ

SEQ ID NO: 6981 - protein, 14 aa, synthetic construct
  source 1..14: note = Seed: PPFLWMGYELHPDK; note = HLAs: DPA10103-DPB10101 DPA10103-DPB10201 DPA10103-DPB10202 DPA10103-DPB10401 DPA10103-DPB112601 DPA10103-DPB11501 DPA10103-DPB11601 DPA10103-DPB11901 DPA10103-DPB12301 DPA10103-DPB13101 DPA10103-DPB13401 DPA10103-DPB13901 DPA10103-DPB14001 DPA10103-DPB14101 DPA10103-DPB14801 DPA10103-DPB15001 DPA10103-DPB15901 DPA10104-DPB10101 DPA10104-DPB11501 DPA10105-DPB10101 DPA10105-DPB10401 DPA10105-DPB15001 DPA10106-DPB10101 DPA10201-DPB10101 DPA10201-DPB110601 DPA10201-DPB11501 DPA10201-DPB11601 DPA10201-DPB11901 DPA10202-DPB10101 DPA10202-DPB10201 DPA10202-DPB10202 DPA10202-DPB10401 DPA10202-DPB110601 DPA10202-DPB11901 DPA10202-DPB13101 DPA10202-DPB16501 DPA10301-DPB10101 DPA10301-DPB10201 DPA10301-DPB10202 DPA10301-DPB10401 DPA10301-DPB10402 DPA10301-DPB110501 DPA10301-DPB110601 DPA10301-DPB11801 DPA10301-DPB12301 DPA10301-DPB13901 DPA10301-DPB14001 DPA10301-DPB14901 DPA10301-DPB15501 DPA10301-DPB16501 DPA10301-DPB17501 DPA10301-DPB18001 DPA10401-DPB10101 DPA10401-DPB10201; note = HLAs: DPA10401-DPB10202 DPA10401-DPB10402 DPA10401-DPB10501 DPA10401-DPB110501 DPA10401-DPB14901
PPFLWIGFELKPDK

SEQ ID NO: 6982 - protein, 20 aa, synthetic construct
  source 1..20: note = Seed: KEPPFLWMGYELHPDKWTVQ; note = HLAs: DRB1_0101 DRB1_0405 DRB1_1001 DPA10103-DPB10101 DPA10103-DPB10201 DPA10103-DPB10202 DPA10103-DPB10401 DPA10103-DPB10402 DPA10103-DPB10501 DPA10103-DPB110501 DPA10103-DPB112601 DPA10103-DPB11501 DPA10103-DPB11601 DPA10103-DPB11801 DPA10103-DPB11901 DPA10103-DPB12301 DPA10103-DPB13101 DPA10103-DPB13401 DPA10103-DPB13901 DPA10103-DPB14001 DPA10103-DPB14101 DPA10103-DPB14801 DPA10103-DPB14901 DPA10103-DPB15001 DPA10103-DPB15101 DPA10103-DPB15501 DPA10103-DPB15901 DPA10103-DPB18001 DPA10104-DPB10101 DPA10104-DPB11501 DPA10105-DPB10101 DPA10105-DPB10401 DPA10105-DPB11801 DPA10105-DPB15001 DPA10106-DPB10101 DPA10201-DPB10101 DPA10201-DPB10201 DPA10201-DPB10202 DPA10201-DPB10401 DPA10201-DPB10501 DPA10201-DPB110601 DPA10201-DPB11501 DPA10201-DPB11601 DPA10201-DPB11901 DPA10201-DPB13401 DPA10201-DPB15501 DPA10202-DPB10101 DPA10202-DPB10201 DPA10202-DPB10202 DPA10202-DPB10401 DPA10202-DPB10501 DPA10202-DPB110601 DPA10202-DPB11101 DPA10202-DPB11301 DPA10202-DPB11801 DPA10202-DPB11901; note = HLAs: DPA10202-DPB13101 DPA10202-DPB13801 DPA10202-DPB15501 DPA10202-DPB16501 DPA10301-DPB10101 DPA10301-DPB10201 DPA10301-DPB10202 DPA10301-DPB10401 DPA10301-DPB10402 DPA10301-DPB110501 DPA10301-DPB110601 DPA10301-DPB11101 DPA10301-DPB11301 DPA10301-DPB11801 DPA10301-DPB12301 DPA10301-DPB13901 DPA10301-DPB14001 DPA10301-DPB14901 DPA10301-DPB15501 DPA10301-DPB16501 DPA10301-DPB17501 DPA10301-DPB18001 DPA10401-DPB10101 DPA10401-DPB10201 DPA10401-DPB10202 DPA10401-DPB10402 DPA10401-DPB10501 DPA10401-DPB110501 DPA10401-DPB14901
KEPPFLWSGVELIPDKWTVQ

SEQ ID NO: 6983 - protein, 14 aa, synthetic construct
  source 1..14: note = Seed: PPFLWMGYELHPDK; note = HLAs: DPA10103-DPB10101 DPA10103-DPB10201 DPA10103-DPB10202 DPA10103-DPB10401 DPA10103-DPB112601 DPA10103-DPB11501 DPA10103-DPB11601 DPA10103-DPB11901 DPA10103-DPB12301 DPA10103-DPB13101 DPA10103-DPB13401 DPA10103-DPB13901 DPA10103-DPB14001 DPA10103-DPB14101 DPA10103-DPB14801 DPA10103-DPB15001 DPA10103-DPB15901 DPA10104-DPB10101 DPA10104-DPB11501 DPA10105-DPB10101 DPA10105-DPB10401 DPA10105-DPB15001 DPA10106-DPB10101 DPA10201-DPB10101 DPA10201-DPB110601 DPA10201-DPB11501 DPA10201-DPB11601 DPA10201-DPB11901 DPA10202-DPB10101 DPA10202-DPB10201 DPA10202-DPB10202 DPA10202-DPB10401 DPA10202-DPB110601 DPA10202-DPB11901 DPA10202-DPB13101 DPA10202-DPB16501 DPA10301-DPB10101 DPA10301-DPB10201 DPA10301-DPB10202 DPA10301-DPB10401 DPA10301-DPB10402 DPA10301-DPB110501 DPA10301-DPB110601 DPA10301-DPB11801 DPA10301-DPB12301 DPA10301-DPB13901 DPA10301-DPB14001 DPA10301-DPB14901 DPA10301-DPB15501 DPA10301-DPB16501 DPA10301-DPB17501 DPA10301-DPB18001 DPA10401-DPB10101 DPA10401-DPB10201; note = HLAs: DPA10401-DPB10202 DPA10401-DPB10402 DPA10401-DPB10501 DPA10401-DPB110501 DPA10401-DPB14901
PPCLWSGFELIPDK

SEQ ID NO: 6984 - protein, 20 aa, synthetic construct
  source 1..20: note = Seed: KEPPFLWMGYELHPDKWTVQ; note = HLAs: DPA10103-DPB10101 DPA10103-DPB10201 DPA10103-DPB10202 DPA10103-DPB10401 DPA10103-DPB10402 DPA10103-DPB10501 DPA10103-DPB110501 DPA10103-DPB112601 DPA10103-DPB11501 DPA10103-DPB11601 DPA10103-DPB11801 DPA10103-DPB11901 DPA10103-DPB12301 DPA10103-DPB13101 DPA10103-DPB13401 DPA10103-DPB13901 DPA10103-DPB14001 DPA10103-DPB14101 DPA10103-DPB14801 DPA10103-DPB14901 DPA10103-DPB15001 DPA10103-DPB15101 DPA10103-DPB15501 DPA10103-DPB15901 DPA10103-DPB18001 DPA10104-DPB10101 DPA10104-DPB11501 DPA10105-DPB10101 DPA10105-DPB10401 DPA10105-DPB11801 DPA10105-DPB15001 DPA10106-DPB10101 DPA10201-DPB10101 DPA10201-DPB10201 DPA10201-DPB10202 DPA10201-DPB10401 DPA10201-DPB10501 DPA10201-DPB110601 DPA10201-DPB11501 DPA10201-DPB11601 DPA10201-DPB11901 DPA10201-DPB13401 DPA10201-DPB15501 DPA10202-DPB10101 DPA10202-DPB10201 DPA10202-DPB10202 DPA10202-DPB10401 DPA10202-DPB10501 DPA10202-DPB110601 DPA10202-DPB11101 DPA10202-DPB11301 DPA10202-DPB11801 DPA10202-DPB11901 DPA10202-DPB13101 DPA10202-DPB13801; note = HLAs: DPA10202-DPB15501 DPA10202-DPB16501 DPA10301-DPB10101 DPA10301-DPB10201 DPA10301-DPB10202 DPA10301-DPB10401 DPA10301-DPB10402 DPA10301-DPB110501 DPA10301-DPB110601 DPA10301-DPB11101 DPA10301-DPB11301 DPA10301-DPB11801 DPA10301-DPB12301 DPA10301-DPB13901 DPA10301-DPB14001 DPA10301-DPB14901 DPA10301-DPB16501 DPA10301-DPB17501 DPA10301-DPB18001 DPA10401-DPB10101 DPA10401-DPB10201 DPA10401-DPB10202 DPA10401-DPB10402 DPA10401-DPB10501 DPA10401-DPB110501 DPA10401-DPB14901
KEPPLLWQGFELFPDKWTVQ

SEQ ID NO: 6985 - protein, 14 aa, synthetic construct
  source 1..14: note = Seed: PPFLWMGYELHPDK; note = HLAs: DPA10103-DPB10101 DPA10103-DPB10201 DPA10103-DPB10202 DPA10103-DPB10401 DPA10103-DPB112601 DPA10103-DPB11501 DPA10103-DPB11601 DPA10103-DPB11901 DPA10103-DPB12301 DPA10103-DPB13101 DPA10103-DPB13401 DPA10103-DPB13901 DPA10103-DPB14001 DPA10103-DPB14101 DPA10103-DPB14801 DPA10103-DPB15001 DPA10103-DPB15901 DPA10104-DPB10101 DPA10104-DPB11501 DPA10105-DPB10101 DPA10105-DPB10401 DPA10105-DPB15001 DPA10106-DPB10101 DPA10201-DPB10101 DPA10201-DPB110601 DPA10201-DPB11501 DPA10201-DPB11601 DPA10201-DPB11901 DPA10202-DPB10101 DPA10202-DPB10201 DPA10202-DPB10202 DPA10202-DPB10401 DPA10202-DPB110601 DPA10202-DPB11901 DPA10202-DPB13101 DPA10202-DPB16501 DPA10301-DPB10101 DPA10301-DPB10201 DPA10301-DPB10202 DPA10301-DPB10401 DPA10301-DPB10402 DPA10301-DPB110501 DPA10301-DPB110601 DPA10301-DPB11801 DPA10301-DPB12301 DPA10301-DPB13901 DPA10301-DPB14001 DPA10301-DPB14901 DPA10301-DPB15501 DPA10301-DPB16501 DPA10301-DPB17501 DPA10301-DPB18001 DPA10401-DPB10101 DPA10401-DPB10201; note = HLAs: DPA10401-DPB10202 DPA10401-DPB10402 DPA10401-DPB10501 DPA10401-DPB110501 DPA10401-DPB14901
PPFLWAGYELYPDK

SEQ ID NO: 6986 - protein, 20 aa, synthetic construct
  source 1..20: note = Seed: KEPPFLWMGYELHPDKWTVQ; note = HLAs: DPA10103-DPB10101 DPA10103-DPB10201 DPA10103-DPB10202 DPA10103-DPB10401 DPA10103-DPB10402 DPA10103-DPB10501 DPA10103-DPB110501 DPA10103-DPB112601 DPA10103-DPB11501 DPA10103-DPB11601 DPA10103-DPB11801 DPA10103-DPB11901 DPA10103-DPB12301 DPA10103-DPB13101 DPA10103-DPB13401 DPA10103-DPB13901 DPA10103-DPB14001 DPA10103-DPB14101 DPA10103-DPB14801 DPA10103-DPB14901 DPA10103-DPB15001 DPA10103-DPB15101 DPA10103-DPB15501 DPA10103-DPB15901 DPA10103-DPB18001 DPA10104-DPB10101 DPA10104-DPB11501 DPA10105-DPB10101 DPA10105-DPB10401 DPA10105-DPB11801 DPA10105-DPB15001 DPA10106-DPB10101 DPA10201-DPB10101 DPA10201-DPB10201 DPA10201-DPB10202 DPA10201-DPB10401 DPA10201-DPB10501 DPA10201-DPB110601 DPA10201-DPB11501 DPA10201-DPB11601 DPA10201-DPB11901 DPA10201-DPB13401 DPA10201-DPB15501 DPA10202-DPB10101 DPA10202-DPB10201 DPA10202-DPB10202 DPA10202-DPB10401 DPA10202-DPB10501 DPA10202-DPB110601 DPA10202-DPB11101 DPA10202-DPB11301 DPA10202-DPB11801 DPA10202-DPB11901 DPA10202-DPB13101 DPA10202-DPB13801; note = HLAs: DPA10202-DPB15501 DPA10202-DPB16501 DPA10301-DPB10101 DPA10301-DPB10201 DPA10301-DPB10202 DPA10301-DPB10401 DPA10301-DPB10402 DPA10301-DPB110501 DPA10301-DPB110601 DPA10301-DPB11101 DPA10301-DPB11301 DPA10301-DPB11801 DPA10301-DPB12301 DPA10301-DPB13901 DPA10301-DPB14001 DPA10301-DPB14901 DPA10301-DPB15501 DPA10301-DPB16501 DPA10301-DPB17501 DPA10301-DPB18001 DPA10401-DPB10101 DPA10401-DPB10201 DPA10401-DPB10202 DPA10401-DPB10402 DPA10401-DPB10501 DPA10401-DPB110501 DPA10401-DPB14901
KEPPILWQGFELMPDKWTVQ

SEQ ID NO: 6987 - protein, 20 aa, synthetic construct
  source 1..20: note = Seed: KEPPFLWMGYELHPDKWTVQ; note = HLAs: DRB1_0101 DRB1_1001 DPA10103-DPB10101 DPA10103-DPB10201 DPA10103-DPB10202 DPA10103-DPB10401 DPA10103-DPB10402 DPA10103-DPB10501 DPA10103-DPB110501 DPA10103-DPB112601 DPA10103-DPB11501 DPA10103-DPB11601 DPA10103-DPB11801 DPA10103-DPB11901 DPA10103-DPB12301 DPA10103-DPB13101 DPA10103-DPB13401 DPA10103-DPB13901 DPA10103-DPB14001 DPA10103-DPB14101 DPA10103-DPB14801 DPA10103-DPB14901 DPA10103-DPB15001 DPA10103-DPB15101 DPA10103-DPB15501 DPA10103-DPB15901 DPA10103-DPB18001 DPA10104-DPB10101 DPA10104-DPB11501 DPA10105-DPB10101 DPA10105-DPB10401 DPA10105-DPB11801 DPA10105-DPB15001 DPA10106-DPB10101 DPA10201-DPB10101 DPA10201-DPB10201 DPA10201-DPB10202 DPA10201-DPB10401 DPA10201-DPB10501 DPA10201-DPB110601 DPA10201-DPB11501 DPA10201-DPB11601 DPA10201-DPB11901 DPA10201-DPB13401 DPA10201-DPB15501 DPA10202-DPB10101 DPA10202-DPB10201 DPA10202-DPB10202 DPA10202-DPB10401 DPA10202-DPB10501 DPA10202-DPB110601 DPA10202-DPB11301 DPA10202-DPB11801 DPA10202-DPB11901 DPA10202-DPB13101; note = HLAs: DPA10202-DPB13801 DPA10202-DPB15501 DPA10202-DPB16501 DPA10301-DPB10101 DPA10301-DPB10201 DPA10301-DPB10202 DPA10301-DPB10401 DPA10301-DPB10402 DPA10301-DPB110501 DPA10301-DPB110601 DPA10301-DPB11101 DPA10301-DPB11301 DPA10301-DPB11801 DPA10301-DPB12301 DPA10301-DPB13901 DPA10301-DPB14001 DPA10301-DPB14901 DPA10301-DPB15501 DPA10301-DPB16501 DPA10301-DPB17501 DPA10301-DPB18001 DPA10401-DPB10101 DPA10401-DPB10201 DPA10401-DPB10202 DPA10401-DPB10402 DPA10401-DPB10501 DPA10401-DPB110501 DPA10401-DPB14901
KEPPFLWSGLELAPDKWTVQ

SEQ ID NO: 6988 - protein, 14 aa, synthetic construct
  source 1..14: note = Seed: PPFLWMGYELHPDK; note = HLAs: DPA10103-DPB10101 DPA10103-DPB10201 DPA10103-DPB10202 DPA10103-DPB10401 DPA10103-DPB112601 DPA10103-DPB11501 DPA10103-DPB11601 DPA10103-DPB11901 DPA10103-DPB12301 DPA10103-DPB13101 DPA10103-DPB13401 DPA10103-DPB13901 DPA10103-DPB14001 DPA10103-DPB14101 DPA10103-DPB14801 DPA10103-DPB15001 DPA10103-DPB15901 DPA10104-DPB10101 DPA10104-DPB11501 DPA10105-DPB10101 DPA10105-DPB10401 DPA10105-DPB15001 DPA10106-DPB10101 DPA10201-DPB10101 DPA10201-DPB110601 DPA10201-DPB11501 DPA10201-DPB11601 DPA10201-DPB11901 DPA10202-DPB10101 DPA10202-DPB10201 DPA10202-DPB10202 DPA10202-DPB10401 DPA10202-DPB110601 DPA10202-DPB11901 DPA10202-DPB13101 DPA10202-DPB16501 DPA10301-DPB10101 DPA10301-DPB10201 DPA10301-DPB10202 DPA10301-DPB10401 DPA10301-DPB10402 DPA10301-DPB110501 DPA10301-DPB110601 DPA10301-DPB11801 DPA10301-DPB12301 DPA10301-DPB13901 DPA10301-DPB14001 DPA10301-DPB14901 DPA10301-DPB15501 DPA10301-DPB16501 DPA10301-DPB17501 DPA10301-DPB18001 DPA10401-DPB10101 DPA10401-DPB10201; note = HLAs: DPA10401-DPB10202 DPA10401-DPB10402 DPA10401-DPB10501 DPA10401-DPB110501 DPA10401-DPB14901
PPLLWDGFELLPDK

SEQ ID NO: 6989 - protein, 14 aa, synthetic construct
  source 1..14: note = Seed: PPFLWMGYELHPDK; note = HLAs: DPA10103-DPB10101 DPA10103-DPB10201 DPA10103-DPB10202 DPA10103-DPB10401 DPA10103-DPB112601 DPA10103-DPB11501 DPA10103-DPB11601 DPA10103-DPB11901 DPA10103-DPB12301 DPA10103-DPB13101 DPA10103-DPB13401 DPA10103-DPB13901 DPA10103-DPB14001 DPA10103-DPB14101 DPA10103-DPB14801 DPA10103-DPB15001 DPA10103-DPB15901 DPA10104-DPB10101 DPA10104-DPB11501 DPA10105-DPB10101 DPA10105-DPB10401 DPA10105-DPB15001 DPA10106-DPB10101 DPA10201-DPB10101 DPA10201-DPB110601 DPA10201-DPB11501 DPA10201-DPB11601 DPA10201-DPB11901 DPA10202-DPB10101 DPA10202-DPB10201 DPA10202-DPB10202 DPA10202-DPB10401 DPA10202-DPB110601 DPA10202-DPB11901 DPA10202-DPB13101 DPA10202-DPB16501 DPA10301-DPB10101 DPA10301-DPB10201 DPA10301-DPB10202 DPA10301-DPB10401 DPA10301-DPB10402 DPA10301-DPB110501 DPA10301-DPB110601 DPA10301-DPB11801 DPA10301-DPB12301 DPA10301-DPB13901 DPA10301-DPB14001 DPA10301-DPB14901 DPA10301-DPB15501 DPA10301-DPB16501 DPA10301-DPB17501 DPA10301-DPB18001 DPA10401-DPB10101 DPA10401-DPB10201; note = HLAs: DPA10401-DPB10202 DPA10401-DPB10402 DPA10401-DPB10501 DPA10401-DPB110501 DPA10401-DPB14901
PPFLWTGMELMPDK

SEQ ID NO: 6990 - protein, 14 aa, synthetic construct
  source 1..14: note = Seed: PPFLWMGYELHPDK; note = HLAs: DPA10103-DPB10101 DPA10103-DPB10201 DPA10103-DPB10202 DPA10103-DPB10401 DPA10103-DPB112601 DPA10103-DPB11501 DPA10103-DPB11601 DPA10103-DPB11901 DPA10103-DPB12301 DPA10103-DPB13101 DPA10103-DPB13401 DPA10103-DPB13901 DPA10103-DPB14001 DPA10103-DPB14101 DPA10103-DPB14801 DPA10103-DPB15001 DPA10103-DPB15901 DPA10104-DPB10101 DPA10104-DPB11501 DPA10105-DPB10101 DPA10105-DPB10401 DPA10105-DPB15001 DPA10106-DPB10101 DPA10201-DPB10101 DPA10201-DPB110601 DPA10201-DPB11501 DPA10201-DPB11601 DPA10201-DPB11901 DPA10202-DPB10101 DPA10202-DPB10201 DPA10202-DPB10202 DPA10202-DPB10401 DPA10202-DPB110601 DPA10202-DPB11901 DPA10202-DPB13101 DPA10202-DPB16501 DPA10301-DPB10101 DPA10301-DPB10201 DPA10301-DPB10202 DPA10301-DPB10401 DPA10301-DPB10402 DPA10301-DPB110501 DPA10301-DPB110601 DPA10301-DPB11801 DPA10301-DPB12301 DPA10301-DPB13901 DPA10301-DPB14001 DPA10301-DPB14901 DPA10301-DPB15501 DPA10301-DPB16501 DPA10301-DPB17501 DPA10301-DPB18001 DPA10401-DPB10101 DPA10401-DPB10201; note = HLAs: DPA10401-DPB10202 DPA10401-DPB10402 DPA10401-DPB10501 DPA10401-DPB110501 DPA10401-DPB14901
PPFLWEGWELMPDK

SEQ ID NO: 6991 - protein, 20 aa, synthetic construct
  source 1..20: note = Seed: KEPPFLWMGYELHPDKWTVQ; note = HLAs: DRB1_0101 DRB1_1001 DPA10103-DPB10101 DPA10103-DPB10201 DPA10103-DPB10202 DPA10103-DPB10401 DPA10103-DPB10402 DPA10103-DPB10501 DPA10103-DPB110501 DPA10103-DPB112601 DPA10103-DPB11501 DPA10103-DPB11601 DPA10103-DPB11801 DPA10103-DPB11901 DPA10103-DPB12301 DPA10103-DPB13101 DPA10103-DPB13401 DPA10103-DPB13901 DPA10103-DPB14001 DPA10103-DPB14101 DPA10103-DPB14801 DPA10103-DPB14901 DPA10103-DPB15001 DPA10103-DPB15101 DPA10103-DPB15501 DPA10103-DPB15901 DPA10103-DPB18001 DPA10104-DPB10101 DPA10104-DPB11501 DPA10105-DPB10101 DPA10105-DPB10401 DPA10105-DPB11801 DPA10105-DPB15001 DPA10106-DPB10101 DPA10201-DPB10101 DPA10201-DPB10201 DPA10201-DPB10202 DPA10201-DPB10401 DPA10201-DPB10501 DPA10201-DPB110601 DPA10201-DPB11501 DPA10201-DPB11601 DPA10201-DPB11901 DPA10201-DPB13401 DPA10201-DPB15501 DPA10202-DPB10101 DPA10202-DPB10201 DPA10202-DPB10202 DPA10202-DPB10401 DPA10202-DPB10501 DPA10202-DPB110601 DPA10202-DPB11101 DPA10202-DPB11301 DPA10202-DPB11801 DPA10202-DPB11901; note = HLAs: DPA10202-DPB13101 DPA10202-DPB13801 DPA10202-DPB15501 DPA10202-DPB16501 DPA10301-DPB10101 DPA10301-DPB10201 DPA10301-DPB10202 DPA10301-DPB10401 DPA10301-DPB10402 DPA10301-DPB110501 DPA10301-DPB110601 DPA10301-DPB11101 DPA10301-DPB11301 DPA10301-DPB11801 DPA10301-DPB12301 DPA10301-DPB13901 DPA10301-DPB14001 DPA10301-DPB14901 DPA10301-DPB15501 DPA10301-DPB16501 DPA10301-DPB17501 DPA10301-DPB18001 DPA10401-DPB10101 DPA10401-DPB10201 DPA10401-DPB10202 DPA10401-DPB10402 DPA10401-DPB10501 DPA10401-DPB110501 DPA10401-DPB14901
KEPPFLWIGLELVPDKWTVQ

SEQ ID NO: 6992 - protein, 14 aa, synthetic construct
  source 1..14: note = Seed: PPFLWMGYELHPDK; note = HLAs: DPA10103-DPB10101 DPA10103-DPB10201 DPA10103-DPB10202 DPA10103-DPB10401 DPA10103-DPB112601 DPA10103-DPB11501 DPA10103-DPB11601 DPA10103-DPB11901 DPA10103-DPB12301 DPA10103-DPB13101 DPA10103-DPB13401 DPA10103-DPB13901 DPA10103-DPB14001 DPA10103-DPB14101 DPA10103-DPB14801 DPA10103-DPB15001 DPA10103-DPB15901 DPA10104-DPB10101 DPA10104-DPB11501 DPA10105-DPB10101 DPA10105-DPB10401 DPA10105-DPB15001 DPA10106-DPB10101 DPA10201-DPB10101 DPA10201-DPB110601 DPA10201-DPB11501 DPA10201-DPB11601 DPA10201-DPB11901 DPA10202-DPB10101 DPA10202-DPB10201 DPA10202-DPB10202 DPA10202-DPB10401 DPA10202-DPB110601 DPA10202-DPB11901 DPA10202-DPB13101 DPA10202-DPB16501 DPA10301-DPB10101 DPA10301-DPB10201 DPA10301-DPB10202 DPA10301-DPB10401 DPA10301-DPB10402 DPA10301-DPB110501 DPA10301-DPB110601 DPA10301-DPB11801 DPA10301-DPB12301 DPA10301-DPB13901 DPA10301-DPB14001 DPA10301-DPB14901 DPA10301-DPB15501 DPA10301-DPB16501 DPA10301-DPB17501 DPA10301-DPB18001 DPA10401-DPB10101 DPA10401-DPB10201; note = HLAs: DPA10401-DPB10202 DPA10401-DPB10402 DPA10401-DPB10501 DPA10401-DPB110501 DPA10401-DPB14901
PPMLWTGFELSPDK

SEQ ID NO: 6993 - protein, 14 aa, synthetic construct
  source 1..14: note = Seed: PPFLWMGYELHPDK; note = HLAs: DPA10103-DPB10201 DPA10103-DPB10202 DPA10103-DPB10401 DPA10103-DPB112601 DPA10103-DPB11501 DPA10103-DPB11601 DPA10103-DPB11901 DPA10103-DPB12301 DPA10103-DPB13101 DPA10103-DPB13401 DPA10103-DPB13901 DPA10103-DPB14001 DPA10103-DPB14101 DPA10103-DPB14801 DPA10103-DPB15901 DPA10104-DPB11501 DPA10105-DPB10401 DPA10106-DPB10101 DPA10201-DPB10101 DPA10201-DPB110601 DPA10201-DPB11501 DPA10201-DPB11601 DPA10201-DPB11901 DPA10202-DPB10201 DPA10202-DPB10202 DPA10202-DPB110601 DPA10202-DPB11901 DPA10202-DPB16501 DPA10301-DPB10201 DPA10301-DPB10202 DPA10301-DPB10402 DPA10301-DPB110501 DPA10301-DPB110601 DPA10301-DPB11801 DPA10301-DPB14001 DPA10301-DPB14901 DPA10301-DPB17501 DPA10301-DPB18001 DPA10401-DPB10201 DPA10401-DPB10202 DPA10401-DPB10402 DPA10401-DPB110501 DPA10401-DPB14901
PPLLWRGFELLPDK

SEQ ID NO: 6994 - protein, 14 aa, synthetic construct
  source 1..14: note = Seed: PPFLWMGYELHPDK; note = HLAs: DPA10103-DPB10101 DPA10103-DPB10201 DPA10103-DPB10202 DPA10103-DPB10401 DPA10103-DPB112601 DPA10103-DPB11501 DPA10103-DPB11601 DPA10103-DPB11901 DPA10103-DPB12301 DPA10103-DPB13101 DPA10103-DPB13401 DPA10103-DPB13901 DPA10103-DPB14001 DPA10103-DPB14101 DPA10103-DPB14801 DPA10103-DPB15001 DPA10103-DPB15901 DPA10104-DPB10101 DPA10104-DPB11501 DPA10105-DPB10101 DPA10105-DPB10401 DPA10105-DPB15001 DPA10106-DPB10101 DPA10201-DPB10101 DPA10201-DPB110601 DPA10201-DPB11501 DPA10201-DPB11601 DPA10201-DPB11901 DPA10202-DPB10101 DPA10202-DPB10201 DPA10202-DPB10202 DPA10202-DPB10401 DPA10202-DPB110601 DPA10202-DPB11901 DPA10202-DPB13101 DPA10202-DPB16501 DPA10301-DPB10101 DPA10301-DPB10201 DPA10301-DPB10202 DPA10301-DPB10402 DPA10301-DPB110501 DPA10301-DPB110601 DPA10301-DPB14901 DPA10301-DPB16501 DPA10301-DPB17501 DPA10301-DPB18001 DPA10401-DPB10101 DPA10401-DPB10201 DPA10401-DPB10202 DPA10401-DPB10402 DPA10401-DPB10501 DPA10401-DPB110501 DPA10401-DPB14901
PPCLWSGFELLPDK

SEQ ID NO: 6995 - protein, 20 aa, synthetic construct
  source 1..20: note = Seed: KEPPFLWMGYELHPDKWTVQ; note = HLAs: DPA10103-DPB10101 DPA10103-DPB10201 DPA10103-DPB10202 DPA10103-DPB10401 DPA10103-DPB10402 DPA10103-DPB10501 DPA10103-DPB110501 DPA10103-DPB112601 DPA10103-DPB11501 DPA10103-DPB11601 DPA10103-DPB11801 DPA10103-DPB11901 DPA10103-DPB12301 DPA10103-DPB13101 DPA10103-DPB13401 DPA10103-DPB13901 DPA10103-DPB14001 DPA10103-DPB14101 DPA10103-DPB14801 DPA10103-DPB14901 DPA10103-DPB15001 DPA10103-DPB15101 DPA10103-DPB15501 DPA10103-DPB15901 DPA10103-DPB18001 DPA10104-DPB10101 DPA10104-DPB11501 DPA10105-DPB10101 DPA10105-DPB10401 DPA10105-DPB11801 DPA10105-DPB15001 DPA10106-DPB10101 DPA10201-DPB10101 DPA10201-DPB10201 DPA10201-DPB10202 DPA10201-DPB10401 DPA10201-DPB10501 DPA10201-DPB110601 DPA10201-DPB11501 DPA10201-DPB11601 DPA10201-DPB11901 DPA10201-DPB13401 DPA10201-DPB15501 DPA10202-DPB10101 DPA10202-DPB10201 DPA10202-DPB10202 DPA10202-DPB10401 DPA10202-DPB10501 DPA10202-DPB110601 DPA10202-DPB11101 DPA10202-DPB11301 DPA10202-DPB11801 DPA10202-DPB11901 DPA10202-DPB13101 DPA10202-DPB13801; note = HLAs: DPA10202-DPB15501 DPA10202-DPB16501 DPA10301-DPB10101 DPA10301-DPB10201 DPA10301-DPB10202 DPA10301-DPB10401 DPA10301-DPB10402 DPA10301-DPB110501 DPA10301-DPB110601 DPA10301-DPB11101 DPA10301-DPB11301 DPA10301-DPB11801 DPA10301-DPB12301 DPA10301-DPB13901 DPA10301-DPB14001 DPA10301-DPB14901 DPA10301-DPB15501 DPA10301-DPB16501 DPA10301-DPB17501 DPA10301-DPB18001 DPA10401-DPB10101 DPA10401-DPB10201 DPA10401-DPB10202 DPA10401-DPB10402 DPA10401-DPB10501 DPA10401-DPB110501 DPA10401-DPB14901
KEPPLLWTGFELEPDKWTVQ

SEQ ID NO: 6996 - protein, 20 aa, synthetic construct
  source 1..20: note = Seed: KEPPFLWMGYELHPDKWTVQ; note = HLAs: DPA10103-DPB10101 DPA10103-DPB10201 DPA10103-DPB10202 DPA10103-DPB10401 DPA10103-DPB10402 DPA10103-DPB10501 DPA10103-DPB110501 DPA10103-DPB112601 DPA10103-DPB11501 DPA10103-DPB11601 DPA10103-DPB11801 DPA10103-DPB11901 DPA10103-DPB12301 DPA10103-DPB13101 DPA10103-DPB13401 DPA10103-DPB13901 DPA10103-DPB14001 DPA10103-DPB14101 DPA10103-DPB14801 DPA10103-DPB14901 DPA10103-DPB15001 DPA10103-DPB15101 DPA10103-DPB15501 DPA10103-DPB15901 DPA10103-DPB18001 DPA10104-DPB10101 DPA10104-DPB11501 DPA10105-DPB10101 DPA10105-DPB10401 DPA10105-DPB11801 DPA10105-DPB15001 DPA10106-DPB10101 DPA10201-DPB10101 DPA10201-DPB10201 DPA10201-DPB10202 DPA10201-DPB10401 DPA10201-DPB10501 DPA10201-DPB110601 DPA10201-DPB11501 DPA10201-DPB11601 DPA10201-DPB11901 DPA10201-DPB13401 DPA10201-DPB15501 DPA10202-DPB10101 DPA10202-DPB10201 DPA10202-DPB10202 DPA10202-DPB10401 DPA10202-DPB10501 DPA10202-DPB110601 DPA10202-DPB11101 DPA10202-DPB11301 DPA10202-DPB11801 DPA10202-DPB11901 DPA10202-DPB13101 DPA10202-DPB13801; note = HLAs: DPA10202-DPB15501 DPA10202-DPB16501 DPA10301-DPB10101 DPA10301-DPB10201 DPA10301-DPB10202 DPA10301-DPB10401 DPA10301-DPB10402 DPA10301-DPB110501 DPA10301-DPB110601 DPA10301-DPB11101 DPA10301-DPB11301 DPA10301-DPB11801 DPA10301-DPB12301 DPA10301-DPB13901 DPA10301-DPB14001 DPA10301-DPB14901 DPA10301-DPB15501 DPA10301-DPB16501 DPA10301-DPB17501 DPA10301-DPB18001 DPA10401-DPB10101 DPA10401-DPB10201 DPA10401-DPB10202 DPA10401-DPB10402 DPA10401-DPB10501 DPA10401-DPB110501 DPA10401-DPB14901
KEPPLLWTGFELHPDKWTVQ

SEQ ID NO: 6997 - protein, 20 aa, synthetic construct
  source 1..20: note = Seed: KEPPFLWMGYELHPDKWTVQ; note = HLAs: DRB1_0101 DRB1_1001 DPA10103-DPB10101 DPA10103-DPB10201 DPA10103-DPB10202 DPA10103-DPB10401 DPA10103-DPB10402 DPA10103-DPB10501 DPA10103-DPB110501 DPA10103-DPB112601 DPA10103-DPB11501 DPA10103-DPB11601 DPA10103-DPB11801 DPA10103-DPB11901 DPA10103-DPB12301 DPA10103-DPB13101 DPA10103-DPB13401 DPA10103-DPB13901 DPA10103-DPB14001 DPA10103-DPB14101 DPA10103-DPB14801 DPA10103-DPB14901 DPA10103-DPB15001 DPA10103-DPB15101 DPA10103-DPB15501 DPA10103-DPB15901 DPA10103-DPB18001 DPA10104-DPB10101 DPA10104-DPB11501 DPA10105-DPB10101 DPA10105-DPB10401 DPA10105-DPB11801 DPA10105-DPB15001 DPA10106-DPB10101 DPA10201-DPB10101 DPA10201-DPB10201 DPA10201-DPB10202 DPA10201-DPB10401 DPA10201-DPB10501 DPA10201-DPB110601 DPA10201-DPB11501 DPA10201-DPB11601 DPA10201-DPB11901 DPA10201-DPB13401 DPA10201-DPB15501 DPA10202-DPB10101 DPA10202-DPB10201 DPA10202-DPB10202 DPA10202-DPB10401 DPA10202-DPB10501 DPA10202-DPB110601 DPA10202-DPB11301 DPA10202-DPB11801 DPA10202-DPB11901 DPA10202-DPB13101; note = HLAs: DPA10202-DPB13801 DPA10202-DPB15501 DPA10202-DPB16501 DPA10301-DPB10101 DPA10301-DPB10201 DPA10301-DPB10202 DPA10301-DPB10401 DPA10301-DPB10402 DPA10301-DPB110501 DPA10301-DPB110601 DPA10301-DPB11101 DPA10301-DPB11301 DPA10301-DPB11801 DPA10301-DPB12301 DPA10301-DPB13901 DPA10301-DPB14001 DPA10301-DPB14901 DPA10301-DPB15501 DPA10301-DPB16501 DPA10301-DPB17501 DPA10301-DPB18001 DPA10401-DPB10101 DPA10401-DPB10201 DPA10401-DPB10202 DPA10401-DPB10402 DPA10401-DPB10501 DPA10401-DPB110501 DPA10401-DPB14901
KEPPYLWTGIELLPDKWTVQ

SEQ ID NO: 6998 - protein, 14 aa, synthetic construct
  source 1..14: note = Seed: PPFLWMGYELHPDK; note = HLAs: DPA10103-DPB10101 DPA10103-DPB10201 DPA10103-DPB10202 DPA10103-DPB10401 DPA10103-DPB112601 DPA10103-DPB11501 DPA10103-DPB11601 DPA10103-DPB11901 DPA10103-DPB12301 DPA10103-DPB13101 DPA10103-DPB13401 DPA10103-DPB13901 DPA10103-DPB14001 DPA10103-DPB14101 DPA10103-DPB14801 DPA10103-DPB15001 DPA10103-DPB15901 DPA10104-DPB10101 DPA10104-DPB11501 DPA10105-DPB10101 DPA10105-DPB10401 DPA10105-DPB15001 DPA10106-DPB10101 DPA10201-DPB10101 DPA10201-DPB110601 DPA10201-DPB11501 DPA10201-DPB11601 DPA10201-DPB11901 DPA10202-DPB10101 DPA10202-DPB10201 DPA10202-DPB10202 DPA10202-DPB10401 DPA10202-DPB110601 DPA10202-DPB11901 DPA10202-DPB13101 DPA10202-DPB16501 DPA10301-DPB10101 DPA10301-DPB10201 DPA10301-DPB10202 DPA10301-DPB10401 DPA10301-DPB10402 DPA10301-DPB110501 DPA10301-DPB110601 DPA10301-DPB11801 DPA10301-DPB12301 DPA10301-DPB13901 DPA10301-DPB14001 DPA10301-DPB14901 DPA10301-DPB15501 DPA10301-DPB16501 DPA10301-DPB17501 DPA10301-DPB18001 DPA10401-DPB10101 DPA10401-DPB10201; note = HLAs: DPA10401-DPB10202 DPA10401-DPB10402 DPA10401-DPB10501 DPA10401-DPB110501 DPA10401-DPB14901
PPILWIGFELYPDK

SEQ ID NO: 6999 - protein, 14 aa, synthetic construct
  source 1..14: note = Seed: PPFLWMGYELHPDK; note = HLAs: DRB1_1001 DPA10103-DPB10101 DPA10103-DPB10201 DPA10103-DPB10202 DPA10103-DPB10401 DPA10103-DPB112601 DPA10103-DPB11501 DPA10103-DPB11601 DPA10103-DPB11901 DPA10103-DPB12301 DPA10103-DPB13101 DPA10103-DPB13401 DPA10103-DPB13901 DPA10103-DPB14001 DPA10103-DPB14101 DPA10103-DPB14801 DPA10103-DPB15001 DPA10103-DPB15901 DPA10104-DPB10101 DPA10104-DPB11501 DPA10105-DPB10101 DPA10105-DPB10401 DPA10105-DPB15001 DPA10106-DPB10101 DPA10201-DPB10101 DPA10201-DPB110601 DPA10201-DPB11501 DPA10201-DPB11601 DPA10201-DPB11901 DPA10202-DPB10101 DPA10202-DPB10201 DPA10202-DPB10202 DPA10202-DPB10401 DPA10202-DPB110601 DPA10202-DPB11901 DPA10202-DPB13101 DPA10202-DPB16501 DPA10301-DPB10101 DPA10301-DPB10201 DPA10301-DPB10202 DPA10301-DPB10401 DPA10301-DPB10402 DPA10301-DPB110501 DPA10301-DPB110601 DPA10301-DPB11801 DPA10301-DPB12301 DPA10301-DPB13901 DPA10301-DPB14001 DPA10301-DPB14901 DPA10301-DPB15501 DPA10301-DPB16501 DPA10301-DPB17501 DPA10301-DPB18001 DPA10401-DPB10101 DPA10401-DPB10201; note = HLAs: DPA10401-DPB10202 DPA10401-DPB10402 DPA10401-DPB10501 DPA10401-DPB110501 DPA10401-DPB14901
PPFLWTGLELTPDK

SEQ ID NO: 7000 - protein, 14 aa, synthetic construct
  source 1..14: note = Seed: PPFLWMGYELHPDK; note = HLAs: DRB1_1001 DPA10103-DPB10101 DPA10103-DPB10201 DPA10103-DPB10202 DPA10103-DPB10401 DPA10103-DPB112601 DPA10103-DPB11501 DPA10103-DPB11601 DPA10103-DPB11901 DPA10103-DPB12301 DPA10103-DPB13101 DPA10103-DPB13401 DPA10103-DPB13901 DPA10103-DPB14001 DPA10103-DPB14101 DPA10103-DPB14801 DPA10103-DPB15001 DPA10103-DPB15901 DPA10104-DPB10101 DPA10104-DPB11501 DPA10105-DPB10101 DPA10105-DPB10401 DPA10105-DPB15001 DPA10106-DPB10101 DPA10201-DPB10101 DPA10201-DPB110601 DPA10201-DPB11501 DPA10201-DPB11601 DPA10201-DPB11901 DPA10202-DPB10101 DPA10202-DPB10201 DPA10202-DPB10202 DPA10202-DPB10401 DPA10202-DPB110601 DPA10202-DPB11901 DPA10202-DPB13101 DPA10202-DPB16501 DPA10301-DPB10101 DPA10301-DPB10201 DPA10301-DPB10202 DPA10301-DPB10401 DPA10301-DPB10402 DPA10301-DPB110501 DPA10301-DPB110601 DPA10301-DPB11801 DPA10301-DPB12301 DPA10301-DPB13901 DPA10301-DPB14001 DPA10301-DPB14901 DPA10301-DPB15501 DPA10301-DPB16501 DPA10301-DPB17501 DPA10301-DPB18001 DPA10401-DPB10101 DPA10401-DPB10201; note = HLAs: DPA10401-DPB10202 DPA10401-DPB10402 DPA10401-DPB10501 DPA10401-DPB110501 DPA10401-DPB14901
PPFLWLGIELIPDK

SEQ ID NO: 7001 - protein, 14 aa, synthetic construct
  source 1..14: note = Seed: PPFLWMGYELHPDK; note = HLAs: DPA10103-DPB10101 DPA10103-DPB10201 DPA10103-DPB10202 DPA10103-DPB10401 DPA10103-DPB112601 DPA10103-DPB11501 DPA10103-DPB11601 DPA10103-DPB11901 DPA10103-DPB12301 DPA10103-DPB13101 DPA10103-DPB13401 DPA10103-DPB13901 DPA10103-DPB14001 DPA10103-DPB14101 DPA10103-DPB14801 DPA10103-DPB15001 DPA10103-DPB15901 DPA10104-DPB10101 DPA10104-DPB11501 DPA10105-DPB10101 DPA10105-DPB10401 DPA10105-DPB15001 DPA10106-DPB10101 DPA10201-DPB10101 DPA10201-DPB110601 DPA10201-DPB11501 DPA10201-DPB11601 DPA10201-DPB11901 DPA10202-DPB10101 DPA10202-DPB10201 DPA10202-DPB10202 DPA10202-DPB10401 DPA10202-DPB110601 DPA10202-DPB11901 DPA10202-DPB13101 DPA10202-DPB16501 DPA10301-DPB10101 DPA10301-DPB10201 DPA10301-DPB10202 DPA10301-DPB10401 DPA10301-DPB10402 DPA10301-DPB110501 DPA10301-DPB110601 DPA10301-DPB11801 DPA10301-DPB12301 DPA10301-DPB13901 DPA10301-DPB14001 DPA10301-DPB14901 DPA10301-DPB15501 DPA10301-DPB16501 DPA10301-DPB17501 DPA10301-DPB18001 DPA10401-DPB10101 DPA10401-DPB10201; note = HLAs: DPA10401-DPB10202 DPA10401-DPB10402 DPA10401-DPB10501 DPA10401-DPB110501 DPA10401-DPB14901
PPWLWTGWELLPDK

SEQ ID NO: 7002 - protein, 20 aa, synthetic construct
  source 1..20: note = Seed: KEPPFLWMGYELHPDKWTVQ; note = HLAs: DPA10103-DPB10101 DPA10103-DPB10201 DPA10103-DPB10202 DPA10103-DPB10401 DPA10103-DPB10402 DPA10103-DPB10501 DPA10103-DPB110501 DPA10103-DPB112601 DPA10103-DPB11501 DPA10103-DPB11601 DPA10103-DPB11801 DPA10103-DPB11901 DPA10103-DPB12301 DPA10103-DPB13101 DPA10103-DPB13401 DPA10103-DPB13901 DPA10103-DPB14001 DPA10103-DPB14101 DPA10103-DPB14801 DPA10103-DPB14901 DPA10103-DPB15001 DPA10103-DPB15101 DPA10103-DPB15501 DPA10103-DPB15901 DPA10103-DPB18001 DPA10104-DPB10101 DPA10104-DPB11501 DPA10105-DPB10101 DPA10105-DPB10401 DPA10105-DPB11801 DPA10105-DPB15001 DPA10106-DPB10101 DPA10201-DPB10101 DPA10201-DPB10201 DPA10201-DPB10202 DPA10201-DPB10401 DPA10201-DPB10501 DPA10201-DPB110601 DPA10201-DPB11501 DPA10201-DPB11601 DPA10201-DPB11901 DPA10201-DPB13401 DPA10201-DPB15501 DPA10202-DPB10101 DPA10202-DPB10201 DPA10202-DPB10202 DPA10202-DPB10401 DPA10202-DPB10501 DPA10202-DPB110601 DPA10202-DPB11101 DPA10202-DPB11301 DPA10202-DPB11801 DPA10202-DPB11901 DPA10202-DPB13101 DPA10202-DPB13801; note = HLAs: DPA10202-DPB15501 DPA10202-DPB16501 DPA10301-DPB10101 DPA10301-DPB10201 DPA10301-DPB10202 DPA10301-DPB10402 DPA10301-DPB110501 DPA10301-DPB110601 DPA10301-DPB11301 DPA10301-DPB14001 DPA10301-DPB14901 DPA10301-DPB16501 DPA10301-DPB17501 DPA10301-DPB18001 DPA10401-DPB10101 DPA10401-DPB10201 DPA10401-DPB10202 DPA10401-DPB10402 DPA10401-DPB10501 DPA10401-DPB110501 DPA10401-DPB14901
KEPPCLWTGFELLPDKWTVQ

SEQ ID NO: 7003 - protein, 14 aa, synthetic construct
  source 1..14: note = Seed: PPFLWMGYELHPDK; note = HLAs: DRB1_1001 DPA10103-DPB10101 DPA10103-DPB10201 DPA10103-DPB10202 DPA10103-DPB10401 DPA10103-DPB112601 DPA10103-DPB11501 DPA10103-DPB11601 DPA10103-DPB11901 DPA10103-DPB12301 DPA10103-DPB13101 DPA10103-DPB13401 DPA10103-DPB13901 DPA10103-DPB14001 DPA10103-DPB14101 DPA10103-DPB14801 DPA10103-DPB15001 DPA10103-DPB15901 DPA10104-DPB10101 DPA10104-DPB11501 DPA10105-DPB10101 DPA10105-DPB10401 DPA10105-DPB15001 DPA10106-DPB10101 DPA10201-DPB10101 DPA10201-DPB110601 DPA10201-DPB11501 DPA10201-DPB11601 DPA10201-DPB11901 DPA10202-DPB10101 DPA10202-DPB10201 DPA10202-DPB10202 DPA10202-DPB10401 DPA10202-DPB110601 DPA10202-DPB11901 DPA10202-DPB13101 DPA10202-DPB16501 DPA10301-DPB10101 DPA10301-DPB10201 DPA10301-DPB10202 DPA10301-DPB10401 DPA10301-DPB10402 DPA10301-DPB110501 DPA10301-DPB110601 DPA10301-DPB11801 DPA10301-DPB12301 DPA10301-DPB13901 DPA10301-DPB14001 DPA10301-DPB14901 DPA10301-DPB15501 DPA10301-DPB16501 DPA10301-DPB17501 DPA10301-DPB18001 DPA10401-DPB10101 DPA10401-DPB10201; note = HLAs: DPA10401-DPB10202 DPA10401-DPB10402 DPA10401-DPB10501 DPA10401-DPB110501 DPA10401-DPB14901
PPFLWAGMELIPDK

SEQ ID NO: 7004 - protein, 14 aa, synthetic construct
  source 1..14: note = Seed: PPFLWMGYELHPDK; note = HLAs: DPA10103-DPB10101 DPA10103-DPB10201 DPA10103-DPB10202 DPA10103-DPB10401 DPA10103-DPB112601 DPA10103-DPB11501 DPA10103-DPB11601 DPA10103-DPB11901 DPA10103-DPB12301 DPA10103-DPB13101 DPA10103-DPB13401 DPA10103-DPB13901 DPA10103-DPB14001 DPA10103-DPB14101 DPA10103-DPB14801 DPA10103-DPB15001 DPA10103-DPB15901 DPA10104-DPB10101 DPA10104-DPB11501 DPA10105-DPB10101 DPA10105-DPB10401 DPA10105-DPB15001 DPA10106-DPB10101 DPA10201-DPB10101 DPA10201-DPB110601 DPA10201-DPB11501 DPA10201-DPB11601 DPA10201-DPB11901 DPA10202-DPB10101 DPA10202-DPB10201 DPA10202-DPB10202 DPA10202-DPB10401 DPA10202-DPB110601 DPA10202-DPB11901 DPA10202-DPB13101 DPA10202-DPB16501 DPA10301-DPB10101 DPA10301-DPB10201 DPA10301-DPB10202 DPA10301-DPB10401 DPA10301-DPB10402 DPA10301-DPB110501 DPA10301-DPB110601 DPA10301-DPB11801 DPA10301-DPB12301 DPA10301-DPB13901 DPA10301-DPB14001 DPA10301-DPB14901 DPA10301-DPB15501 DPA10301-DPB16501 DPA10301-DPB17501 DPA10301-DPB18001 DPA10401-DPB10101 DPA10401-DPB10201; note = HLAs: DPA10401-DPB10202 DPA10401-DPB10402 DPA10401-DPB10501 DPA10401-DPB110501 DPA10401-DPB14901
PPFLWDGFELSPDK

SEQ ID NO: 7005 - protein, 14 aa, synthetic construct
  source 1..14: note = Seed: PPFLWMGYELHPDK; note = HLAs: DRB1_1001 DPA10103-DPB10101 DPA10103-DPB10201 DPA10103-DPB10202 DPA10103-DPB10401 DPA10103-DPB112601 DPA10103-DPB11501 DPA10103-DPB11601 DPA10103-DPB11901 DPA10103-DPB12301 DPA10103-DPB13101 DPA10103-DPB13401 DPA10103-DPB13901 DPA10103-DPB14001 DPA10103-DPB14101 DPA10103-DPB14801 DPA10103-DPB15001 DPA10103-DPB15901 DPA10104-DPB10101 DPA10104-DPB11501 DPA10105-DPB10101 DPA10105-DPB10401 DPA10105-DPB15001 DPA10106-DPB10101 DPA10201-DPB10101 DPA10201-DPB110601 DPA10201-DPB11501 DPA10201-DPB11601 DPA10201-DPB11901 DPA10202-DPB10101 DPA10202-DPB10201 DPA10202-DPB10202 DPA10202-DPB10401 DPA10202-DPB110601 DPA10202-DPB11901 DPA10202-DPB13101 DPA10202-DPB16501 DPA10301-DPB10101 DPA10301-DPB10201 DPA10301-DPB10202 DPA10301-DPB10401 DPA10301-DPB10402 DPA10301-DPB110501 DPA10301-DPB110601 DPA10301-DPB11801 DPA10301-DPB12301 DPA10301-DPB13901 DPA10301-DPB14001 DPA10301-DPB14901 DPA10301-DPB15501 DPA10301-DPB16501 DPA10301-DPB17501 DPA10301-DPB18001 DPA10401-DPB10101 DPA10401-DPB10201; note = HLAs: DPA10401-DPB10202 DPA10401-DPB10402 DPA10401-DPB10501 DPA10401-DPB110501 DPA10401-DPB14901
PPYLWFGYELLPDK

SEQ ID NO: 7006 - protein, 20 aa, synthetic construct
  source 1..20: note = Seed: KEPPFLWMGYELHPDKWTVQ; note = HLAs: DPA10103-DPB10101 DPA10103-DPB10201 DPA10103-DPB10202 DPA10103-DPB10401 DPA10103-DPB10402 DPA10103-DPB10501 DPA10103-DPB110501 DPA10103-DPB112601 DPA10103-DPB11501 DPA10103-DPB11601 DPA10103-DPB11801 DPA10103-DPB11901 DPA10103-DPB12301 DPA10103-DPB13101 DPA10103-DPB13401 DPA10103-DPB13901 DPA10103-DPB14001 DPA10103-DPB14101 DPA10103-DPB14801 DPA10103-DPB14901 DPA10103-DPB15001 DPA10103-DPB15101 DPA10103-DPB15501 DPA10103-DPB15901 DPA10103-DPB18001 DPA10104-DPB10101 DPA10104-DPB11501 DPA10105-DPB10101 DPA10105-DPB10401 DPA10105-DPB11801 DPA10105-DPB15001 DPA10106-DPB10101 DPA10201-DPB10101 DPA10201-DPB10201 DPA10201-DPB10202 DPA10201-DPB10401 DPA10201-DPB10501 DPA10201-DPB110601 DPA10201-DPB11501 DPA10201-DPB11601 DPA10201-DPB11901 DPA10201-DPB13401 DPA10201-DPB15501 DPA10202-DPB10101 DPA10202-DPB10201 DPA10202-DPB10202 DPA10202-DPB10401 DPA10202-DPB10501 DPA10202-DPB110601 DPA10202-DPB11101 DPA10202-DPB11301 DPA10202-DPB11801 DPA10202-DPB11901 DPA10202-DPB13101 DPA10202-DPB13801; note = HLAs: DPA10202-DPB15501 DPA10202-DPB16501 DPA10301-DPB10101 DPA10301-DPB10201 DPA10301-DPB10202 DPA10301-DPB10401 DPA10301-DPB10402 DPA10301-DPB110501 DPA10301-DPB110601 DPA10301-DPB11101 DPA10301-DPB11301 DPA10301-DPB11801 DPA10301-DPB12301 DPA10301-DPB13901 DPA10301-DPB14001 DPA10301-DPB14901 DPA10301-DPB15501 DPA10301-DPB16501 DPA10301-DPB17501 DPA10301-DPB18001 DPA10401-DPB10101 DPA10401-DPB10201 DPA10401-DPB10202 DPA10401-DPB10402 DPA10401-DPB10501 DPA10401-DPB110501 DPA10401-DPB14901
KEPPFLWKGLELIPDKWTVQ

SEQ ID NO: 7007 - protein, 20 aa, synthetic construct
  source 1..20: note = Seed: KEPPFLWMGYELHPDKWTVQ; note = HLAs: DPA10103-DPB10101 DPA10103-DPB10201 DPA10103-DPB10202 DPA10103-DPB10401 DPA10103-DPB10402 DPA10103-DPB10501 DPA10103-DPB110501 DPA10103-DPB112601 DPA10103-DPB11501 DPA10103-DPB11601 DPA10103-DPB11801 DPA10103-DPB11901 DPA10103-DPB12301 DPA10103-DPB13101 DPA10103-DPB13401 DPA10103-DPB13901 DPA10103-DPB14001 DPA10103-DPB14101 DPA10103-DPB14801 DPA10103-DPB14901 DPA10103-DPB15001 DPA10103-DPB15101 DPA10103-DPB15501 DPA10103-DPB15901 DPA10103-DPB18001 DPA10104-DPB10101 DPA10104-DPB11501 DPA10105-DPB10101 DPA10105-DPB10401 DPA10105-DPB11801 DPA10105-DPB15001 DPA10106-DPB10101 DPA10201-DPB10101 DPA10201-DPB10201 DPA10201-DPB10202 DPA10201-DPB10401 DPA10201-DPB10501 DPA10201-DPB110601 DPA10201-DPB11501 DPA10201-DPB11601 DPA10201-DPB11901 DPA10201-DPB13401 DPA10201-DPB15501 DPA10202-DPB10101 DPA10202-DPB10201 DPA10202-DPB10202 DPA10202-DPB10401 DPA10202-DPB10501 DPA10202-DPB110601 DPA10202-DPB11301 DPA10202-DPB11801 DPA10202-DPB11901 DPA10202-DPB13101 DPA10202-DPB13801 DPA10202-DPB15501; note = HLAs: DPA10202-DPB16501 DPA10301-DPB10101 DPA10301-DPB10201 DPA10301-DPB10202 DPA10301-DPB10401 DPA10301-DPB10402 DPA10301-DPB110501 DPA10301-DPB110601 DPA10301-DPB11101 DPA10301-DPB11301 DPA10301-DPB11801 DPA10301-DPB12301 DPA10301-DPB13901 DPA10301-DPB14001 DPA10301-DPB14901 DPA10301-DPB15501 DPA10301-DPB16501 DPA10301-DPB17501 DPA10301-DPB18001 DPA10401-DPB10101 DPA10401-DPB10201 DPA10401-DPB10202 DPA10401-DPB10402 DPA10401-DPB10501 DPA10401-DPB110501 DPA10401-DPB14901
KEPPWLWEGFELFPDKWTVQ

SEQ ID NO: 7008 - protein, 20 aa, synthetic construct
  source 1..20: note = Seed: KEPPFLWMGYELHPDKWTVQ; note = HLAs: DRB1_0101 DRB1_1001 DPA10103-DPB10101 DPA10103-DPB10201 DPA10103-DPB10202 DPA10103-DPB10401 DPA10103-DPB10402 DPA10103-DPB10501 DPA10103-DPB110501 DPA10103-DPB112601 DPA10103-DPB11501 DPA10103-DPB11601 DPA10103-DPB11801 DPA10103-DPB11901 DPA10103-DPB12301 DPA10103-DPB13101 DPA10103-DPB13401 DPA10103-DPB13901 DPA10103-DPB14001 DPA10103-DPB14101 DPA10103-DPB14801 DPA10103-DPB14901 DPA10103-DPB15001 DPA10103-DPB15101 DPA10103-DPB15501 DPA10103-DPB15901 DPA10103-DPB18001 DPA10104-DPB10101 DPA10104-DPB11501 DPA10105-DPB10101 DPA10105-DPB10401 DPA10105-DPB11801 DPA10105-DPB15001 DPA10106-DPB10101 DPA10201-DPB10101 DPA10201-DPB10201 DPA10201-DPB10202 DPA10201-DPB10401 DPA10201-DPB10501 DPA10201-DPB110601 DPA10201-DPB11501 DPA10201-DPB11601 DPA10201-DPB11901 DPA10201-DPB13401 DPA10201-DPB15501 DPA10202-DPB10101 DPA10202-DPB10201 DPA10202-DPB10202 DPA10202-DPB10401 DPA10202-DPB10501 DPA10202-DPB110601 DPA10202-DPB11101 DPA10202-DPB11301 DPA10202-DPB11801 DPA10202-DPB11901; note = HLAs: DPA10202-DPB13101 DPA10202-DPB13801 DPA10202-DPB15501 DPA10202-DPB16501 DPA10301-DPB10101 DPA10301-DPB10201 DPA10301-DPB10202 DPA10301-DPB10401 DPA10301-DPB10402 DPA10301-DPB110501 DPA10301-DPB110601 DPA10301-DPB11101 DPA10301-DPB11301 DPA10301-DPB11801 DPA10301-DPB12301 DPA10301-DPB13901 DPA10301-DPB14001 DPA10301-DPB14901 DPA10301-DPB15501 DPA10301-DPB16501 DPA10301-DPB17501 DPA10301-DPB18001 DPA10401-DPB10101 DPA10401-DPB10201 DPA10401-DPB10202 DPA10401-DPB10402 DPA10401-DPB10501 DPA10401-DPB110501 DPA10401-DPB14901
KEPPFLWAGLELMPDKWTVQ

SEQ ID NO: 7009 - protein, 14 aa, synthetic construct
  source 1..14: note = Seed: PPFLWMGYELHPDK; note = HLAs: DRB1_1001 DPA10103-DPB10101 DPA10103-DPB10201 DPA10103-DPB10202 DPA10103-DPB10401 DPA10103-DPB112601 DPA10103-DPB11501 DPA10103-DPB11601 DPA10103-DPB11901 DPA10103-DPB12301 DPA10103-DPB13101 DPA10103-DPB13401 DPA10103-DPB13901 DPA10103-DPB14001 DPA10103-DPB14101 DPA10103-DPB14801 DPA10103-DPB15001 DPA10103-DPB15901 DPA10104-DPB10101 DPA10104-DPB11501 DPA10105-DPB10101 DPA10105-DPB10401 DPA10105-DPB15001 DPA10106-DPB10101 DPA10201-DPB10101 DPA10201-DPB110601 DPA10201-DPB11501 DPA10201-DPB11601 DPA10201-DPB11901 DPA10202-DPB10101 DPA10202-DPB10201 DPA10202-DPB10202 DPA10202-DPB10401 DPA10202-DPB110601 DPA10202-DPB11901 DPA10202-DPB13101 DPA10202-DPB16501 DPA10301-DPB10101 DPA10301-DPB10201 DPA10301-DPB10202 DPA10301-DPB10401 DPA10301-DPB10402 DPA10301-DPB110501 DPA10301-DPB110601 DPA10301-DPB11801 DPA10301-DPB12301 DPA10301-DPB13901 DPA10301-DPB14001 DPA10301-DPB14901 DPA10301-DPB15501 DPA10301-DPB16501 DPA10301-DPB17501 DPA10301-DPB18001 DPA10401-DPB10101 DPA10401-DPB10201; note = HLAs: DPA10401-DPB10202 DPA10401-DPB10402 DPA10401-DPB10501 DPA10401-DPB110501 DPA10401-DPB14901
PPFLWTGLELAPDK

SEQ ID NO: 7010 - protein, 14 aa, synthetic construct
  source 1..14: note = Seed: PPFLWMGYELHPDK; note = HLAs: DPA10103-DPB10101 DPA10103-DPB10201 DPA10103-DPB10202 DPA10103-DPB10401 DPA10103-DPB112601 DPA10103-DPB11501 DPA10103-DPB11601 DPA10103-DPB11901 DPA10103-DPB12301 DPA10103-DPB13101 DPA10103-DPB13401 DPA10103-DPB13901 DPA10103-DPB14001 DPA10103-DPB14101 DPA10103-DPB14801 DPA10103-DPB15001 DPA10103-DPB15901 DPA10104-DPB10101 DPA10104-DPB11501 DPA10105-DPB10101 DPA10105-DPB10401 DPA10105-DPB15001 DPA10106-DPB10101 DPA10201-DPB10101 DPA10201-DPB110601 DPA10201-DPB11501 DPA10201-DPB11601 DPA10201-DPB11901 DPA10202-DPB10101 DPA10202-DPB10201 DPA10202-DPB10202 DPA10202-DPB10401 DPA10202-DPB110601 DPA10202-DPB11901 DPA10202-DPB13101 DPA10202-DPB16501 DPA10301-DPB10101 DPA10301-DPB10201 DPA10301-DPB10202 DPA10301-DPB10401 DPA10301-DPB10402 DPA10301-DPB110501 DPA10301-DPB110601 DPA10301-DPB11801 DPA10301-DPB12301 DPA10301-DPB13901 DPA10301-DPB14001 DPA10301-DPB14901 DPA10301-DPB15501 DPA10301-DPB16501 DPA10301-DPB17501 DPA10301-DPB18001 DPA10401-DPB10101 DPA10401-DPB10201; note = HLAs: DPA10401-DPB10202 DPA10401-DPB10402 DPA10401-DPB10501 DPA10401-DPB110501 DPA10401-DPB14901
PPWLWNGFELFPDK

SEQ ID NO: 7011 - protein, 20 aa, synthetic construct
  source 1..20: note = Seed: KEPPFLWMGYELHPDKWTVQ; note = HLAs: DRB1_0101 DRB1_1001 DPA10103-DPB10101 DPA10103-DPB10201 DPA10103-DPB10202 DPA10103-DPB10401 DPA10103-DPB10402 DPA10103-DPB10501 DPA10103-DPB110501 DPA10103-DPB112601 DPA10103-DPB11501 DPA10103-DPB11601 DPA10103-DPB11801 DPA10103-DPB11901 DPA10103-DPB12301 DPA10103-DPB13101 DPA10103-DPB13401 DPA10103-DPB13901 DPA10103-DPB14001 DPA10103-DPB14101 DPA10103-DPB14801 DPA10103-DPB14901 DPA10103-DPB15001 DPA10103-DPB15101 DPA10103-DPB15501 DPA10103-DPB15901 DPA10103-DPB18001 DPA10104-DPB10101 DPA10104-DPB11501 DPA10105-DPB10101 DPA10105-DPB10401 DPA10105-DPB11801 DPA10105-DPB15001 DPA10106-DPB10101 DPA10201-DPB10101 DPA10201-DPB10201 DPA10201-DPB10202 DPA10201-DPB10401 DPA10201-DPB10501 DPA10201-DPB110601 DPA10201-DPB11501 DPA10201-DPB11601 DPA10201-DPB11901 DPA10201-DPB13401 DPA10201-DPB15501 DPA10202-DPB10101 DPA10202-DPB10201 DPA10202-DPB10202 DPA10202-DPB10401 DPA10202-DPB10501 DPA10202-DPB110601 DPA10202-DPB11101 DPA10202-DPB11301 DPA10202-DPB11801 DPA10202-DPB11901; note = HLAs: DPA10202-DPB13101 DPA10202-DPB13801 DPA10202-DPB15501 DPA10202-DPB16501 DPA10301-DPB10101 DPA10301-DPB10201 DPA10301-DPB10202 DPA10301-DPB10401 DPA10301-DPB10402 DPA10301-DPB110501 DPA10301-DPB110601 DPA10301-DPB11101 DPA10301-DPB11301 DPA10301-DPB11801 DPA10301-DPB12301 DPA10301-DPB13901 DPA10301-DPB14001 DPA10301-DPB14901 DPA10301-DPB15501 DPA10301-DPB16501 DPA10301-DPB17501 DPA10301-DPB18001 DPA10401-DPB10101 DPA10401-DPB10201 DPA10401-DPB10202 DPA10401-DPB10402 DPA10401-DPB10501 DPA10401-DPB110501 DPA10401-DPB14901
KEPPYLWTGLELVPDKWTVQ

SEQ ID NO: 7012 - protein, 14 aa, synthetic construct
  source 1..14: note = Seed: PPFLWMGYELHPDK; note = HLAs: DPA10103-DPB10101 DPA10103-DPB10201 DPA10103-DPB10202 DPA10103-DPB10401 DPA10103-DPB112601 DPA10103-DPB11501 DPA10103-DPB11601 DPA10103-DPB11901 DPA10103-DPB12301 DPA10103-DPB13101 DPA10103-DPB13401 DPA10103-DPB13901 DPA10103-DPB14001 DPA10103-DPB14101 DPA10103-DPB14801 DPA10103-DPB15001 DPA10103-DPB15901 DPA10104-DPB10101 DPA10104-DPB11501 DPA10105-DPB10101 DPA10105-DPB10401 DPA10105-DPB15001 DPA10106-DPB10101 DPA10201-DPB10101 DPA10201-DPB110601 DPA10201-DPB11501 DPA10201-DPB11601 DPA10201-DPB11901 DPA10202-DPB10101 DPA10202-DPB10201 DPA10202-DPB10202 DPA10202-DPB10401 DPA10202-DPB110601 DPA10202-DPB11901 DPA10202-DPB13101 DPA10202-DPB16501 DPA10301-DPB10101 DPA10301-DPB10201 DPA10301-DPB10202 DPA10301-DPB10401 DPA10301-DPB10402 DPA10301-DPB110501 DPA10301-DPB110601 DPA10301-DPB11801 DPA10301-DPB12301 DPA10301-DPB13901 DPA10301-DPB14001 DPA10301-DPB14901 DPA10301-DPB15501 DPA10301-DPB16501 DPA10301-DPB17501 DPA10301-DPB18001 DPA10401-DPB10101 DPA10401-DPB10201; note = HLAs: DPA10401-DPB10202 DPA10401-DPB10402 DPA10401-DPB10501 DPA10401-DPB110501 DPA10401-DPB14901
PPMLWTGYELLPDK

SEQ ID NO: 7013 - protein, 20 aa, synthetic construct
  source 1..20: note = Seed: KEPPFLWMGYELHPDKWTVQ; note = HLAs: DRB1_0101 DRB1_1001 DPA10103-DPB10101 DPA10103-DPB10201 DPA10103-DPB10202 DPA10103-DPB10401 DPA10103-DPB10402 DPA10103-DPB10501 DPA10103-DPB110501 DPA10103-DPB112601 DPA10103-DPB11501 DPA10103-DPB11601 DPA10103-DPB11801 DPA10103-DPB11901 DPA10103-DPB12301 DPA10103-DPB13101 DPA10103-DPB13401 DPA10103-DPB13901 DPA10103-DPB14001 DPA10103-DPB14101 DPA10103-DPB14801 DPA10103-DPB14901 DPA10103-DPB15001 DPA10103-DPB15101 DPA10103-DPB15501 DPA10103-DPB15901 DPA10103-DPB18001 DPA10104-DPB10101 DPA10104-DPB11501 DPA10105-DPB10101 DPA10105-DPB10401 DPA10105-DPB11801 DPA10105-DPB15001 DPA10106-DPB10101 DPA10201-DPB10101 DPA10201-DPB10201 DPA10201-DPB10202 DPA10201-DPB10401 DPA10201-DPB10501 DPA10201-DPB110601 DPA10201-DPB11501 DPA10201-DPB11601 DPA10201-DPB11901 DPA10201-DPB13401 DPA10201-DPB15501 DPA10202-DPB10101 DPA10202-DPB10201 DPA10202-DPB10202 DPA10202-DPB10401 DPA10202-DPB10501 DPA10202-DPB110601 DPA10202-DPB11101 DPA10202-DPB11301 DPA10202-DPB11801 DPA10202-DPB11901; note = HLAs: DPA10202-DPB13101 DPA10202-DPB13801 DPA10202-DPB15501 DPA10202-DPB16501 DPA10301-DPB10101 DPA10301-DPB10201 DPA10301-DPB10202 DPA10301-DPB10401 DPA10301-DPB10402 DPA10301-DPB110501 DPA10301-DPB110601 DPA10301-DPB11101 DPA10301-DPB11301 DPA10301-DPB11801 DPA10301-DPB12301 DPA10301-DPB13901 DPA10301-DPB14001 DPA10301-DPB14901 DPA10301-DPB15501 DPA10301-DPB16501 DPA10301-DPB17501 DPA10301-DPB18001 DPA10401-DPB10101 DPA10401-DPB10201 DPA10401-DPB10202 DPA10401-DPB10402 DPA10401-DPB10501 DPA10401-DPB110501 DPA10401-DPB14901
KEPPFLWVGLELVPDKWTVQ

SEQ ID NO: 7014 - protein, 20 aa, synthetic construct
  source 1..20: note = Seed: KEPPFLWMGYELHPDKWTVQ; note = HLAs: DPA10103-DPB10101 DPA10103-DPB10201 DPA10103-DPB10202 DPA10103-DPB10401 DPA10103-DPB10402 DPA10103-DPB10501 DPA10103-DPB110501 DPA10103-DPB112601 DPA10103-DPB11501 DPA10103-DPB11601 DPA10103-DPB11801 DPA10103-DPB11901 DPA10103-DPB12301 DPA10103-DPB13101 DPA10103-DPB13401 DPA10103-DPB13901 DPA10103-DPB14001 DPA10103-DPB14101 DPA10103-DPB14801 DPA10103-DPB14901 DPA10103-DPB15001 DPA10103-DPB15101 DPA10103-DPB15501 DPA10103-DPB15901 DPA10103-DPB18001 DPA10104-DPB10101 DPA10104-DPB11501 DPA10105-DPB10101 DPA10105-DPB10401 DPA10105-DPB11801 DPA10105-DPB15001 DPA10106-DPB10101 DPA10201-DPB10101 DPA10201-DPB10201 DPA10201-DPB10202 DPA10201-DPB10401 DPA10201-DPB10501 DPA10201-DPB110601 DPA10201-DPB11501 DPA10201-DPB11601 DPA10201-DPB11901 DPA10201-DPB13401 DPA10201-DPB15501 DPA10202-DPB10101 DPA10202-DPB10201 DPA10202-DPB10202 DPA10202-DPB10401 DPA10202-DPB10501 DPA10202-DPB110601 DPA10202-DPB11101 DPA10202-DPB11301 DPA10202-DPB11801 DPA10202-DPB11901 DPA10202-DPB13101 DPA10202-DPB13801; note = HLAs: DPA10202-DPB15501 DPA10202-DPB16501 DPA10301-DPB10101 DPA10301-DPB10201 DPA10301-DPB10202 DPA10301-DPB10401 DPA10301-DPB10402 DPA10301-DPB110501 DPA10301-DPB110601 DPA10301-DPB11101 DPA10301-DPB11301 DPA10301-DPB11801 DPA10301-DPB12301 DPA10301-DPB13901 DPA10301-DPB14001 DPA10301-DPB14901 DPA10301-DPB15501 DPA10301-DPB16501 DPA10301-DPB17501 DPA10301-DPB18001 DPA10401-DPB10101 DPA10401-DPB10201 DPA10401-DPB10202 DPA10401-DPB10402 DPA10401-DPB10501 DPA10401-DPB110501 DPA10401-DPB14901
KEPPVLWNGFELVPDKWTVQ

SEQ ID NO: 7015 - protein, 20 aa, synthetic construct
  source 1..20: note = Seed: KEPPFLWMGYELHPDKWTVQ; note = HLAs: DRB1_0101 DRB1_0405 DRB1_1001 DPA10103-DPB10101 DPA10103-DPB10201 DPA10103-DPB10202 DPA10103-DPB10401 DPA10103-DPB10402 DPA10103-DPB10501 DPA10103-DPB110501 DPA10103-DPB112601 DPA10103-DPB11501 DPA10103-DPB11601 DPA10103-DPB11801 DPA10103-DPB11901 DPA10103-DPB12301 DPA10103-DPB13401 DPA10103-DPB13901 DPA10103-DPB14001 DPA10103-DPB14101 DPA10103-DPB14801 DPA10103-DPB14901 DPA10103-DPB15101 DPA10103-DPB15501 DPA10103-DPB15901 DPA10103-DPB18001 DPA10104-DPB10101 DPA10104-DPB11501 DPA10105-DPB10101 DPA10105-DPB10401 DPA10105-DPB11801 DPA10106-DPB10101 DPA10201-DPB10101 DPA10201-DPB10201 DPA10201-DPB10202 DPA10201-DPB10401 DPA10201-DPB10501 DPA10201-DPB110601 DPA10201-DPB11501 DPA10201-DPB11601 DPA10201-DPB11901 DPA10201-DPB13401 DPA10201-DPB15501 DPA10202-DPB10101 DPA10202-DPB10201 DPA10202-DPB10202 DPA10202-DPB10401 DPA10202-DPB10501 DPA10202-DPB110601 DPA10202-DPB11101 DPA10202-DPB11301 DPA10202-DPB11801 DPA10202-DPB11901 DPA10202-DPB13101 DPA10202-DPB13801 DPA10202-DPB15501; note = HLAs: DPA10202-DPB16501 DPA10301-DPB10101 DPA10301-DPB10201 DPA10301-DPB10202 DPA10301-DPB10401 DPA10301-DPB10402 DPA10301-DPB110501 DPA10301-DPB110601 DPA10301-DPB11101 DPA10301-DPB11301 DPA10301-DPB11801 DPA10301-DPB12301 DPA10301-DPB13901 DPA10301-DPB14001 DPA10301-DPB14901 DPA10301-DPB15501 DPA10301-DPB16501 DPA10301-DPB17501 DPA10301-DPB18001 DPA10401-DPB10201 DPA10401-DPB10202 DPA10401-DPB10402 DPA10401-DPB10501 DPA10401-DPB110501 DPA10401-DPB14901
KEPPFLWLGAELLPDKWTVQ

SEQ ID NO: 7016 - protein, 20 aa, synthetic construct
  source 1..20: note = Seed: KEPPFLWMGYELHPDKWTVQ; note = HLAs: DRB1_0101 DRB1_0405 DRB1_1001 DPA10103-DPB10101 DPA10103-DPB10201 DPA10103-DPB10202 DPA10103-DPB10401 DPA10103-DPB10402 DPA10103-DPB10501 DPA10103-DPB110501 DPA10103-DPB112601 DPA10103-DPB11501 DPA10103-DPB11601 DPA10103-DPB11801 DPA10103-DPB11901 DPA10103-DPB12301 DPA10103-DPB13101 DPA10103-DPB13401 DPA10103-DPB13901 DPA10103-DPB14001 DPA10103-DPB14101 DPA10103-DPB14801 DPA10103-DPB14901 DPA10103-DPB15001 DPA10103-DPB15101 DPA10103-DPB15501 DPA10103-DPB15901 DPA10103-DPB18001 DPA10104-DPB10101 DPA10104-DPB11501 DPA10105-DPB10101 DPA10105-DPB10401 DPA10105-DPB11801 DPA10105-DPB15001 DPA10106-DPB10101 DPA10201-DPB10101 DPA10201-DPB10201 DPA10201-DPB10202 DPA10201-DPB10401 DPA10201-DPB10501 DPA10201-DPB110601 DPA10201-DPB11501 DPA10201-DPB11601 DPA10201-DPB11901 DPA10201-DPB13401 DPA10201-DPB15501 DPA10202-DPB10101 DPA10202-DPB10201 DPA10202-DPB10202 DPA10202-DPB10401 DPA10202-DPB10501 DPA10202-DPB110601 DPA10202-DPB11101 DPA10202-DPB11301 DPA10202-DPB11801 DPA10202-DPB11901; note = HLAs: DPA10202-DPB13101 DPA10202-DPB13801 DPA10202-DPB15501 DPA10202-DPB16501 DPA10301-DPB10101 DPA10301-DPB10201 DPA10301-DPB10202 DPA10301-DPB10401 DPA10301-DPB10402 DPA10301-DPB110501 DPA10301-DPB110601 DPA10301-DPB11101 DPA10301-DPB11301 DPA10301-DPB11801 DPA10301-DPB12301 DPA10301-DPB13901 DPA10301-DPB14001 DPA10301-DPB14901 DPA10301-DPB15501 DPA10301-DPB16501 DPA10301-DPB17501 DPA10301-DPB18001 DPA10401-DPB10101 DPA10401-DPB10201 DPA10401-DPB10202 DPA10401-DPB10402 DPA10401-DPB10501 DPA10401-DPB110501 DPA10401-DPB14901
KEPPFLWTGAELVPDKWTVQ

SEQ ID NO: 7017 - protein, 20 aa, synthetic construct
  source 1..20: note = Seed: KEPPFLWMGYELHPDKWTVQ; note = HLAs: DRB1_0101 DRB1_1001 DPA10103-DPB10101 DPA10103-DPB10201 DPA10103-DPB10202 DPA10103-DPB10401 DPA10103-DPB10402 DPA10103-DPB10501 DPA10103-DPB110501 DPA10103-DPB112601 DPA10103-DPB11501 DPA10103-DPB11601 DPA10103-DPB11801 DPA10103-DPB11901 DPA10103-DPB12301 DPA10103-DPB13101 DPA10103-DPB13401 DPA10103-DPB13901 DPA10103-DPB14001 DPA10103-DPB14101 DPA10103-DPB14801 DPA10103-DPB14901 DPA10103-DPB15001 DPA10103-DPB15101 DPA10103-DPB15501 DPA10103-DPB15901 DPA10103-DPB18001 DPA10104-DPB10101 DPA10104-DPB11501 DPA10105-DPB10101 DPA10105-DPB10401 DPA10105-DPB11801 DPA10105-DPB15001 DPA10106-DPB10101 DPA10201-DPB10101 DPA10201-DPB10201 DPA10201-DPB10202 DPA10201-DPB10401 DPA10201-DPB10501 DPA10201-DPB110601 DPA10201-DPB11501 DPA10201-DPB11601 DPA10201-DPB11901 DPA10201-DPB13401 DPA10201-DPB15501 DPA10202-DPB10101 DPA10202-DPB10201 DPA10202-DPB10202 DPA10202-DPB10401 DPA10202-DPB10501 DPA10202-DPB110601 DPA10202-DPB11101 DPA10202-DPB11301 DPA10202-DPB11801 DPA10202-DPB11901; note = HLAs: DPA10202-DPB13101 DPA10202-DPB13801 DPA10202-DPB15501 DPA10202-DPB16501 DPA10301-DPB10101 DPA10301-DPB10201 DPA10301-DPB10202 DPA10301-DPB10401 DPA10301-DPB10402 DPA10301-DPB110501 DPA10301-DPB110601 DPA10301-DPB11101 DPA10301-DPB11301 DPA10301-DPB11801 DPA10301-DPB12301 DPA10301-DPB13901 DPA10301-DPB14001 DPA10301-DPB14901 DPA10301-DPB15501 DPA10301-DPB16501 DPA10301-DPB17501 DPA10301-DPB18001 DPA10401-DPB10101 DPA10401-DPB10201 DPA10401-DPB10202 DPA10401-DPB10402 DPA10401-DPB10501 DPA10401-DPB110501 DPA10401-DPB14901
KEPPFLWTGIELYPDKWTVQ

SEQ ID NO: 7018 - protein, 20 aa, synthetic construct
  source 1..20: note = Seed: KEPPFLWMGYELHPDKWTVQ; note = HLAs: DRB1_0101 DRB1_1001 DPA10103-DPB10101 DPA10103-DPB10201 DPA10103-DPB10202 DPA10103-DPB10401 DPA10103-DPB10402 DPA10103-DPB10501 DPA10103-DPB110501 DPA10103-DPB112601 DPA10103-DPB11501 DPA10103-DPB11601 DPA10103-DPB11801 DPA10103-DPB11901 DPA10103-DPB12301 DPA10103-DPB13101 DPA10103-DPB13401 DPA10103-DPB13901 DPA10103-DPB14001 DPA10103-DPB14101 DPA10103-DPB14801 DPA10103-DPB14901 DPA10103-DPB15001 DPA10103-DPB15101 DPA10103-DPB15501 DPA10103-DPB15901 DPA10103-DPB18001 DPA10104-DPB10101 DPA10104-DPB11501 DPA10105-DPB10101 DPA10105-DPB10401 DPA10105-DPB11801 DPA10105-DPB15001 DPA10106-DPB10101 DPA10201-DPB10101 DPA10201-DPB10201 DPA10201-DPB10202 DPA10201-DPB10401 DPA10201-DPB10501 DPA10201-DPB110601 DPA10201-DPB11501 DPA10201-DPB11601 DPA10201-DPB11901 DPA10201-DPB13401 DPA10201-DPB15501 DPA10202-DPB10101 DPA10202-DPB10201 DPA10202-DPB10202 DPA10202-DPB10401 DPA10202-DPB10501 DPA10202-DPB110601 DPA10202-DPB11101 DPA10202-DPB11301 DPA10202-DPB11801 DPA10202-DPB11901; note = HLAs: DPA10202-DPB13101 DPA10202-DPB13801 DPA10202-DPB15501 DPA10202-DPB16501 DPA10301-DPB10101 DPA10301-DPB10201 DPA10301-DPB10202 DPA10301-DPB10401 DPA10301-DPB10402 DPA10301-DPB110501 DPA10301-DPB110601 DPA10301-DPB11101 DPA10301-DPB11301 DPA10301-DPB11801 DPA10301-DPB12301 DPA10301-DPB13901 DPA10301-DPB14001 DPA10301-DPB14901 DPA10301-DPB15501 DPA10301-DPB16501 DPA10301-DPB17501 DPA10301-DPB18001 DPA10401-DPB10101 DPA10401-DPB10201 DPA10401-DPB10202 DPA10401-DPB10402 DPA10401-DPB10501 DPA10401-DPB110501 DPA10401-DPB14901
KEPPFLWHGVELIPDKWTVQ

SEQ ID NO: 7019 - protein, 20 aa, synthetic construct
  source 1..20: note = Seed: KEPPFLWMGYELHPDKWTVQ; note = HLAs: DPA10103-DPB10101 DPA10103-DPB10201 DPA10103-DPB10202 DPA10103-DPB10401 DPA10103-DPB10402 DPA10103-DPB10501 DPA10103-DPB110501 DPA10103-DPB112601 DPA10103-DPB11501 DPA10103-DPB11601 DPA10103-DPB11801 DPA10103-DPB11901 DPA10103-DPB12301 DPA10103-DPB13101 DPA10103-DPB13401 DPA10103-DPB13901 DPA10103-DPB14001 DPA10103-DPB14101 DPA10103-DPB14801 DPA10103-DPB14901 DPA10103-DPB15001 DPA10103-DPB15101 DPA10103-DPB15501 DPA10103-DPB15901 DPA10103-DPB18001 DPA10104-DPB10101 DPA10104-DPB11501 DPA10105-DPB10101 DPA10105-DPB10401 DPA10105-DPB11801 DPA10105-DPB15001 DPA10106-DPB10101 DPA10201-DPB10101 DPA10201-DPB10201 DPA10201-DPB10202 DPA10201-DPB10401 DPA10201-DPB10501 DPA10201-DPB110601 DPA10201-DPB11501 DPA10201-DPB11601 DPA10201-DPB11901 DPA10201-DPB13401 DPA10201-DPB15501 DPA10202-DPB10101 DPA10202-DPB10201 DPA10202-DPB10202 DPA10202-DPB10401 DPA10202-DPB10501 DPA10202-DPB110601 DPA10202-DPB11101 DPA10202-DPB11301 DPA10202-DPB11801 DPA10202-DPB11901 DPA10202-DPB13101 DPA10202-DPB13801; note = HLAs: DPA10202-DPB15501 DPA10202-DPB16501 DPA10301-DPB10101 DPA10301-DPB10201 DPA10301-DPB10202 DPA10301-DPB10401 DPA10301-DPB10402 DPA10301-DPB110501 DPA10301-DPB110601 DPA10301-DPB11101 DPA10301-DPB11301 DPA10301-DPB11801 DPA10301-DPB12301 DPA10301-DPB13901 DPA10301-DPB14001 DPA10301-DPB14901 DPA10301-DPB15501 DPA10301-DPB16501 DPA10301-DPB17501 DPA10301-DPB18001 DPA10401-DPB10101 DPA10401-DPB10201 DPA10401-DPB10202 DPA10401-DPB10402 DPA10401-DPB10501 DPA10401-DPB110501 DPA10401-DPB14901
KEPPFLWHGFELRPDKWTVQ

SEQ ID NO: 7020 - protein, 20 aa, synthetic construct
  source 1..20: note = Seed: KEPPFLWMGYELHPDKWTVQ; note = HLAs: DRB1_1602 DQA10101-DQB10501 DQA10101-DQB10503 DQA10102-DQB10501 DQA10102-DQB10502 DQA10102-DQB10503 DQA10103-DQB10501 DQA10104-DQB10501 DQA10104-DQB10503 DQA10105-DQB10501 DQA10107-DQB10503 DQA10505-DQB10402
KEPPFLFMGWEIHPVKWTVQ

SEQ ID NO: 7021 - protein, 14 aa, synthetic construct
  source 1..14: note = Seed: PPFLWMGYELHPDK; note = HLAs: DPA10103-DPB10101 DPA10103-DPB10201 DPA10103-DPB10202 DPA10103-DPB10401 DPA10103-DPB112601 DPA10103-DPB11501 DPA10103-DPB11601 DPA10103-DPB11901 DPA10103-DPB12301 DPA10103-DPB13101 DPA10103-DPB13401 DPA10103-DPB13901 DPA10103-DPB14001 DPA10103-DPB14101 DPA10103-DPB14801 DPA10103-DPB15001 DPA10103-DPB15901 DPA10104-DPB10101 DPA10104-DPB11501 DPA10105-DPB10101 DPA10105-DPB10401 DPA10105-DPB15001 DPA10106-DPB10101 DPA10201-DPB10101 DPA10201-DPB110601 DPA10201-DPB11501 DPA10201-DPB11601 DPA10201-DPB11901 DPA10202-DPB10101 DPA10202-DPB10201 DPA10202-DPB10202 DPA10202-DPB10401 DPA10202-DPB110601 DPA10202-DPB11901 DPA10202-DPB13101 DPA10202-DPB16501 DPA10301-DPB10101 DPA10301-DPB10201 DPA10301-DPB10202 DPA10301-DPB10401 DPA10301-DPB10402 DPA10301-DPB110501 DPA10301-DPB110601 DPA10301-DPB11801 DPA10301-DPB12301 DPA10301-DPB13901 DPA10301-DPB14001 DPA10301-DPB14901 DPA10301-DPB15501 DPA10301-DPB16501 DPA10301-DPB17501 DPA10301-DPB18001 DPA10401-DPB10101 DPA10401-DPB10201; note = HLAs: DPA10401-DPB10202 DPA10401-DPB10402 DPA10401-DPB10501 DPA10401-DPB110501 DPA10401-DPB14901
PPLLWTGFELQPDK

SEQ ID NO: 7022 - protein, 20 aa, synthetic construct
  source 1..20: note = Seed: KEPPFLWMGYELHPDKWTVQ; note = HLAs: DRB1_0101 DRB1_1001 DPA10103-DPB10101 DPA10103-DPB10201 DPA10103-DPB10202 DPA10103-DPB10401 DPA10103-DPB10402 DPA10103-DPB10501 DPA10103-DPB110501 DPA10103-DPB112601 DPA10103-DPB11501 DPA10103-DPB11601 DPA10103-DPB11801 DPA10103-DPB11901 DPA10103-DPB12301 DPA10103-DPB13101 DPA10103-DPB13401 DPA10103-DPB13901 DPA10103-DPB14001 DPA10103-DPB14101 DPA10103-DPB14801 DPA10103-DPB14901 DPA10103-DPB15001 DPA10103-DPB15101 DPA10103-DPB15501 DPA10103-DPB15901 DPA10103-DPB18001 DPA10104-DPB10101 DPA10104-DPB11501 DPA10105-DPB10101 DPA10105-DPB10401 DPA10105-DPB11801 DPA10105-DPB15001 DPA10106-DPB10101 DPA10201-DPB10101 DPA10201-DPB10201 DPA10201-DPB10202 DPA10201-DPB10401 DPA10201-DPB10501 DPA10201-DPB110601 DPA10201-DPB11501 DPA10201-DPB11601 DPA10201-DPB11901 DPA10201-DPB13401 DPA10201-DPB15501 DPA10202-DPB10101 DPA10202-DPB10201 DPA10202-DPB10202 DPA10202-DPB10401 DPA10202-DPB10501 DPA10202-DPB110601 DPA10202-DPB11101 DPA10202-DPB11301 DPA10202-DPB11801 DPA10202-DPB11901; note = HLAs: DPA10202-DPB13101 DPA10202-DPB13801 DPA10202-DPB15501 DPA10202-DPB16501 DPA10301-DPB10101 DPA10301-DPB10201 DPA10301-DPB10202 DPA10301-DPB10401 DPA10301-DPB10402 DPA10301-DPB110501 DPA10301-DPB110601 DPA10301-DPB11101 DPA10301-DPB11301 DPA10301-DPB11801 DPA10301-DPB12301 DPA10301-DPB13901 DPA10301-DPB14001 DPA10301-DPB14901 DPA10301-DPB15501 DPA10301-DPB16501 DPA10301-DPB17501 DPA10301-DPB18001 DPA10401-DPB10101 DPA10401-DPB10201 DPA10401-DPB10202 DPA10401-DPB10402 DPA10401-DPB10501 DPA10401-DPB110501 DPA10401-DPB14901
KEPPFLWVGIELVPDKWTVQ

SEQ ID NO: 7023 - protein, 20 aa, synthetic construct
  source 1..20: note = Seed: KEPPFLWMGYELHPDKWTVQ; note = HLAs: DRB1_1001 DPA10103-DPB10101 DPA10103-DPB10201 DPA10103-DPB10202 DPA10103-DPB10401 DPA10103-DPB10402 DPA10103-DPB10501 DPA10103-DPB110501 DPA10103-DPB112601 DPA10103-DPB11501 DPA10103-DPB11601 DPA10103-DPB11801 DPA10103-DPB11901 DPA10103-DPB12301 DPA10103-DPB13101 DPA10103-DPB13401 DPA10103-DPB13901 DPA10103-DPB14001 DPA10103-DPB14101 DPA10103-DPB14801 DPA10103-DPB14901 DPA10103-DPB15001 DPA10103-DPB15101 DPA10103-DPB15501 DPA10103-DPB15901 DPA10103-DPB18001 DPA10104-DPB10101 DPA10104-DPB11501 DPA10105-DPB10101 DPA10105-DPB10401 DPA10105-DPB11801 DPA10105-DPB15001 DPA10106-DPB10101 DPA10201-DPB10101 DPA10201-DPB10201 DPA10201-DPB10202 DPA10201-DPB10401 DPA10201-DPB10501 DPA10201-DPB110601 DPA10201-DPB11501 DPA10201-DPB11601 DPA10201-DPB11901 DPA10201-DPB13401 DPA10201-DPB15501 DPA10202-DPB10101 DPA10202-DPB10201 DPA10202-DPB10202 DPA10202-DPB10401 DPA10202-DPB10501 DPA10202-DPB110601 DPA10202-DPB11101 DPA10202-DPB11301 DPA10202-DPB11801 DPA10202-DPB11901 DPA10202-DPB13101; note = HLAs: DPA10202-DPB13801 DPA10202-DPB15501 DPA10202-DPB16501 DPA10301-DPB10101 DPA10301-DPB10201 DPA10301-DPB10202 DPA10301-DPB10401 DPA10301-DPB10402 DPA10301-DPB110501 DPA10301-DPB110601 DPA10301-DPB11101 DPA10301-DPB11301 DPA10301-DPB11801 DPA10301-DPB12301 DPA10301-DPB13901 DPA10301-DPB14001 DPA10301-DPB14901 DPA10301-DPB15501 DPA10301-DPB16501 DPA10301-DPB17501 DPA10301-DPB18001 DPA10401-DPB10101 DPA10401-DPB10201 DPA10401-DPB10202 DPA10401-DPB10402 DPA10401-DPB10501 DPA10401-DPB110501 DPA10401-DPB14901
KEPPYLWTGFELEPDKWTVQ

SEQ ID NO: 7024 - protein, 14 aa, synthetic construct
  source 1..14: note = Seed: PPFLWMGYELHPDK; note = HLAs: DRB1_1001 DPA10103-DPB10101 DPA10103-DPB10201 DPA10103-DPB10202 DPA10103-DPB10401 DPA10103-DPB112601 DPA10103-DPB11501 DPA10103-DPB11601 DPA10103-DPB11901 DPA10103-DPB12301 DPA10103-DPB13101 DPA10103-DPB13401 DPA10103-DPB13901 DPA10103-DPB14001 DPA10103-DPB14101 DPA10103-DPB14801 DPA10103-DPB15001 DPA10103-DPB15901 DPA10104-DPB10101 DPA10104-DPB11501 DPA10105-DPB10101 DPA10105-DPB10401 DPA10105-DPB15001 DPA10106-DPB10101 DPA10201-DPB10101 DPA10201-DPB110601 DPA10201-DPB11501 DPA10201-DPB11601 DPA10201-DPB11901 DPA10202-DPB10101 DPA10202-DPB10201 DPA10202-DPB10202 DPA10202-DPB10401 DPA10202-DPB110601 DPA10202-DPB11901 DPA10202-DPB13101 DPA10202-DPB16501 DPA10301-DPB10101 DPA10301-DPB10201 DPA10301-DPB10202 DPA10301-DPB10401 DPA10301-DPB10402 DPA10301-DPB110501 DPA10301-DPB110601 DPA10301-DPB11801 DPA10301-DPB12301 DPA10301-DPB13901 DPA10301-DPB14001 DPA10301-DPB14901 DPA10301-DPB15501 DPA10301-DPB16501 DPA10301-DPB17501 DPA10301-DPB18001 DPA10401-DPB10101 DPA10401-DPB10201; note = HLAs: DPA10401-DPB10202 DPA10401-DPB10402 DPA10401-DPB10501 DPA10401-DPB110501 DPA10401-DPB14901
PPWLWIGFELAPDK

SEQ ID NO: 7025 - protein, 20 aa, synthetic construct
  source 1..20: note = Seed: KEPPFLWMGYELHPDKWTVQ; note = HLAs: DRB1_0101 DPA10103-DPB10101 DPA10103-DPB10201 DPA10103-DPB10202 DPA10103-DPB10401 DPA10103-DPB10402 DPA10103-DPB10501 DPA10103-DPB110501 DPA10103-DPB112601 DPA10103-DPB11501 DPA10103-DPB11601 DPA10103-DPB11801 DPA10103-DPB11901 DPA10103-DPB12301 DPA10103-DPB13101 DPA10103-DPB13401 DPA10103-DPB13901 DPA10103-DPB14001 DPA10103-DPB14101 DPA10103-DPB14801 DPA10103-DPB14901 DPA10103-DPB15001 DPA10103-DPB15101 DPA10103-DPB15501 DPA10103-DPB15901 DPA10103-DPB18001 DPA10104-DPB10101 DPA10104-DPB11501 DPA10105-DPB10101 DPA10105-DPB10401 DPA10105-DPB11801 DPA10105-DPB15001 DPA10106-DPB10101 DPA10201-DPB10101 DPA10201-DPB10201 DPA10201-DPB10202 DPA10201-DPB10401 DPA10201-DPB10501 DPA10201-DPB110601 DPA10201-DPB11501 DPA10201-DPB11601 DPA10201-DPB11901 DPA10201-DPB13401 DPA10201-DPB15501 DPA10202-DPB10101 DPA10202-DPB10201 DPA10202-DPB10202 DPA10202-DPB10401 DPA10202-DPB10501 DPA10202-DPB110601 DPA10202-DPB11101 DPA10202-DPB11301 DPA10202-DPB11801 DPA10202-DPB11901 DPA10202-DPB13101; note = HLAs: DPA10202-DPB13801 DPA10202-DPB15501 DPA10202-DPB16501 DPA10301-DPB10101 DPA10301-DPB10201 DPA10301-DPB10202 DPA10301-DPB10401 DPA10301-DPB10402 DPA10301-DPB110501 DPA10301-DPB110601 DPA10301-DPB11101 DPA10301-DPB11301 DPA10301-DPB11801 DPA10301-DPB12301 DPA10301-DPB13901 DPA10301-DPB14001 DPA10301-DPB14901 DPA10301-DPB15501 DPA10301-DPB16501 DPA10301-DPB17501 DPA10301-DPB18001 DPA10401-DPB10101 DPA10401-DPB10201 DPA10401-DPB10202 DPA10401-DPB10402 DPA10401-DPB10501 DPA10401-DPB110501 DPA10401-DPB14901
KEPPFLWEGWELMPDKWTVQ

SEQ ID NO: 7026 - protein, 20 aa, synthetic construct
  source 1..20: note = Seed: KEPPFLWMGYELHPDKWTVQ; note = HLAs: DRB1_0101 DPA10103-DPB10101 DPA10103-DPB10201 DPA10103-DPB10202 DPA10103-DPB10401 DPA10103-DPB10402 DPA10103-DPB10501 DPA10103-DPB110501 DPA10103-DPB112601 DPA10103-DPB11501 DPA10103-DPB11601 DPA10103-DPB11801 DPA10103-DPB11901 DPA10103-DPB12301 DPA10103-DPB13101 DPA10103-DPB13401 DPA10103-DPB13901 DPA10103-DPB14001 DPA10103-DPB14101 DPA10103-DPB14801 DPA10103-DPB14901 DPA10103-DPB15001 DPA10103-DPB15101 DPA10103-DPB15501 DPA10103-DPB15901 DPA10103-DPB18001 DPA10104-DPB10101 DPA10104-DPB11501 DPA10105-DPB10101 DPA10105-DPB10401 DPA10105-DPB11801 DPA10105-DPB15001 DPA10106-DPB10101 DPA10201-DPB10101 DPA10201-DPB10201 DPA10201-DPB10202 DPA10201-DPB10401 DPA10201-DPB10501 DPA10201-DPB110601 DPA10201-DPB11501 DPA10201-DPB11601 DPA10201-DPB11901 DPA10201-DPB13401 DPA10201-DPB15501 DPA10202-DPB10101 DPA10202-DPB10201 DPA10202-DPB10202 DPA10202-DPB10401 DPA10202-DPB10501 DPA10202-DPB110601 DPA10202-DPB11101 DPA10202-DPB11301 DPA10202-DPB11801 DPA10202-DPB11901 DPA10202-DPB13101; note = HLAs: DPA10202-DPB13801 DPA10202-DPB15501 DPA10202-DPB16501 DPA10301-DPB10101 DPA10301-DPB10201 DPA10301-DPB10202 DPA10301-DPB10401 DPA10301-DPB10402 DPA10301-DPB110501 DPA10301-DPB110601 DPA10301-DPB11101 DPA10301-DPB11301 DPA10301-DPB11801 DPA10301-DPB12301 DPA10301-DPB13901 DPA10301-DPB14001 DPA10301-DPB14901 DPA10301-DPB15501 DPA10301-DPB16501 DPA10301-DPB17501 DPA10301-DPB18001 DPA10401-DPB10101 DPA10401-DPB10201 DPA10401-DPB10202 DPA10401-DPB10402 DPA10401-DPB10501 DPA10401-DPB110501 DPA10401-DPB14901
KEPPFLWLGFELRPDKWTVQ

SEQ ID NO: 7027 - protein, 14 aa, synthetic construct
  source 1..14: note = Seed: PPFLWMGYELHPDK; note = HLAs: DPA10103-DPB10101 DPA10103-DPB10201 DPA10103-DPB10202 DPA10103-DPB10401 DPA10103-DPB112601 DPA10103-DPB11501 DPA10103-DPB11601 DPA10103-DPB11901 DPA10103-DPB12301 DPA10103-DPB13101 DPA10103-DPB13401 DPA10103-DPB13901 DPA10103-DPB14001 DPA10103-DPB14101 DPA10103-DPB14801 DPA10103-DPB15001 DPA10103-DPB15901 DPA10104-DPB10101 DPA10104-DPB11501 DPA10105-DPB10101 DPA10105-DPB10401 DPA10105-DPB15001 DPA10106-DPB10101 DPA10201-DPB10101 DPA10201-DPB110601 DPA10201-DPB11501 DPA10201-DPB11601 DPA10201-DPB11901 DPA10202-DPB10101 DPA10202-DPB10201 DPA10202-DPB10202 DPA10202-DPB10401 DPA10202-DPB110601 DPA10202-DPB11901 DPA10202-DPB13101 DPA10202-DPB16501 DPA10301-DPB10101 DPA10301-DPB10201 DPA10301-DPB10202 DPA10301-DPB10401 DPA10301-DPB10402 DPA10301-DPB110501 DPA10301-DPB110601 DPA10301-DPB11801 DPA10301-DPB12301 DPA10301-DPB13901 DPA10301-DPB14001 DPA10301-DPB14901 DPA10301-DPB15501 DPA10301-DPB16501 DPA10301-DPB17501 DPA10301-DPB18001 DPA10401-DPB10101 DPA10401-DPB10201; note = HLAs: DPA10401-DPB10202 DPA10401-DPB10402 DPA10401-DPB10501 DPA10401-DPB110501 DPA10401-DPB14901
PPYLWTGYELFPDK

SEQ ID NO: 7028 - protein, 14 aa, synthetic construct
  source 1..14: note = Seed: PPFLWMGYELHPDK; note = HLAs: DRB1_1001 DPA10103-DPB10101 DPA10103-DPB10201 DPA10103-DPB10202 DPA10103-DPB10401 DPA10103-DPB112601 DPA10103-DPB11501 DPA10103-DPB11601 DPA10103-DPB11901 DPA10103-DPB12301 DPA10103-DPB13101 DPA10103-DPB13401 DPA10103-DPB13901 DPA10103-DPB14001 DPA10103-DPB14101 DPA10103-DPB14801 DPA10103-DPB15001 DPA10103-DPB15901 DPA10104-DPB10101 DPA10104-DPB11501 DPA10105-DPB10101 DPA10105-DPB10401 DPA10105-DPB15001 DPA10106-DPB10101 DPA10201-DPB10101 DPA10201-DPB110601 DPA10201-DPB11501 DPA10201-DPB11601 DPA10201-DPB11901 DPA10202-DPB10101 DPA10202-DPB10201 DPA10202-DPB10202 DPA10202-DPB10401 DPA10202-DPB110601 DPA10202-DPB11901 DPA10202-DPB13101 DPA10202-DPB16501 DPA10301-DPB10101 DPA10301-DPB10201 DPA10301-DPB10202 DPA10301-DPB10401 DPA10301-DPB10402 DPA10301-DPB110501 DPA10301-DPB110601 DPA10301-DPB11801 DPA10301-DPB12301 DPA10301-DPB13901 DPA10301-DPB14001 DPA10301-DPB14901 DPA10301-DPB15501 DPA10301-DPB16501 DPA10301-DPB17501 DPA10301-DPB18001 DPA10401-DPB10101 DPA10401-DPB10201; note = HLAs: DPA10401-DPB10202 DPA10401-DPB10402 DPA10401-DPB10501 DPA10401-DPB110501 DPA10401-DPB14901
PPFLWSGIELMPDK

SEQ ID NO: 7029 - protein, 20 aa, synthetic construct
  source 1..20: note = Seed: KEPPFLWMGYELHPDKWTVQ; note = HLAs: DRB1_0101 DPA10103-DPB10101 DPA10103-DPB10201 DPA10103-DPB10202 DPA10103-DPB10401 DPA10103-DPB10402 DPA10103-DPB10501 DPA10103-DPB110501 DPA10103-DPB112601 DPA10103-DPB11501 DPA10103-DPB11601 DPA10103-DPB11801 DPA10103-DPB11901 DPA10103-DPB12301 DPA10103-DPB13101 DPA10103-DPB13401 DPA10103-DPB13901 DPA10103-DPB14001 DPA10103-DPB14101 DPA10103-DPB14801 DPA10103-DPB14901 DPA10103-DPB15001 DPA10103-DPB15101 DPA10103-DPB15501 DPA10103-DPB15901 DPA10103-DPB18001 DPA10104-DPB10101 DPA10104-DPB11501 DPA10105-DPB10101 DPA10105-DPB10401 DPA10105-DPB11801 DPA10105-DPB15001 DPA10106-DPB10101 DPA10201-DPB10101 DPA10201-DPB10201 DPA10201-DPB10202 DPA10201-DPB10401 DPA10201-DPB10501 DPA10201-DPB110601 DPA10201-DPB11501 DPA10201-DPB11601 DPA10201-DPB11901 DPA10201-DPB13401 DPA10201-DPB15501 DPA10202-DPB10101 DPA10202-DPB10201 DPA10202-DPB10202 DPA10202-DPB10401 DPA10202-DPB10501 DPA10202-DPB110601 DPA10202-DPB11101 DPA10202-DPB11301 DPA10202-DPB11801 DPA10202-DPB11901 DPA10202-DPB13101; note = HLAs: DPA10202-DPB13801 DPA10202-DPB15501 DPA10202-DPB16501 DPA10301-DPB10101 DPA10301-DPB10201 DPA10301-DPB10202 DPA10301-DPB10401 DPA10301-DPB10402 DPA10301-DPB110501 DPA10301-DPB110601 DPA10301-DPB11101 DPA10301-DPB11301 DPA10301-DPB11801 DPA10301-DPB12301 DPA10301-DPB13901 DPA10301-DPB14001 DPA10301-DPB14901 DPA10301-DPB15501 DPA10301-DPB16501 DPA10301-DPB17501 DPA10301-DPB18001 DPA10401-DPB10101 DPA10401-DPB10201 DPA10401-DPB10202 DPA10401-DPB10402 DPA10401-DPB10501 DPA10401-DPB110501 DPA10401-DPB14901
KEPPFLWSGLELYPDKWTVQ

SEQ ID NO: 7030 - protein, 20 aa, synthetic construct
  source 1..20: note = Seed: KEPPFLWMGYELHPDKWTVQ; note = HLAs: DRB1_0101 DPA10103-DPB10101 DPA10103-DPB10201 DPA10103-DPB10202 DPA10103-DPB10401 DPA10103-DPB10402 DPA10103-DPB10501 DPA10103-DPB110501 DPA10103-DPB112601 DPA10103-DPB11501 DPA10103-DPB11601 DPA10103-DPB11801 DPA10103-DPB11901 DPA10103-DPB12301 DPA10103-DPB13101 DPA10103-DPB13401 DPA10103-DPB13901 DPA10103-DPB14001 DPA10103-DPB14101 DPA10103-DPB14801 DPA10103-DPB14901 DPA10103-DPB15001 DPA10103-DPB15101 DPA10103-DPB15501 DPA10103-DPB15901 DPA10103-DPB18001 DPA10104-DPB10101 DPA10104-DPB11501 DPA10105-DPB10101 DPA10105-DPB10401 DPA10105-DPB11801 DPA10105-DPB15001 DPA10106-DPB10101 DPA10201-DPB10101 DPA10201-DPB10201 DPA10201-DPB10202 DPA10201-DPB10401 DPA10201-DPB10501 DPA10201-DPB110601 DPA10201-DPB11501 DPA10201-DPB11601 DPA10201-DPB11901 DPA10201-DPB13401 DPA10201-DPB15501 DPA10202-DPB10101 DPA10202-DPB10201 DPA10202-DPB10202 DPA10202-DPB10401 DPA10202-DPB10501 DPA10202-DPB110601 DPA10202-DPB11101 DPA10202-DPB11301 DPA10202-DPB11801 DPA10202-DPB11901 DPA10202-DPB13101; note = HLAs: DPA10202-DPB13801 DPA10202-DPB15501 DPA10202-DPB16501 DPA10301-DPB10101 DPA10301-DPB10201 DPA10301-DPB10202 DPA10301-DPB10401 DPA10301-DPB10402 DPA10301-DPB110501 DPA10301-DPB110601 DPA10301-DPB11101 DPA10301-DPB11301 DPA10301-DPB11801 DPA10301-DPB12301 DPA10301-DPB13901 DPA10301-DPB14001 DPA10301-DPB14901 DPA10301-DPB15501 DPA10301-DPB16501 DPA10301-DPB17501 DPA10301-DPB18001 DPA10401-DPB10101 DPA10401-DPB10201 DPA10401-DPB10202 DPA10401-DPB10402 DPA10401-DPB10501 DPA10401-DPB110501 DPA10401-DPB14901
KEPPLLWIGFELNPDKWTVQ

SEQ ID NO: 7031 - protein, 14 aa, synthetic construct
  source 1..14: note = Seed: PPFLWMGYELHPDK; note = HLAs: DRB1_1001 DPA10103-DPB10101 DPA10103-DPB10201 DPA10103-DPB10202 DPA10103-DPB10401 DPA10103-DPB112601 DPA10103-DPB11501 DPA10103-DPB11601 DPA10103-DPB11901 DPA10103-DPB12301 DPA10103-DPB13101 DPA10103-DPB13401 DPA10103-DPB13901 DPA10103-DPB14001 DPA10103-DPB14101 DPA10103-DPB14801 DPA10103-DPB15001 DPA10103-DPB15901 DPA10104-DPB10101 DPA10104-DPB11501 DPA10105-DPB10101 DPA10105-DPB10401 DPA10105-DPB15001 DPA10106-DPB10101 DPA10201-DPB10101 DPA10201-DPB110601 DPA10201-DPB11501 DPA10201-DPB11601 DPA10201-DPB11901 DPA10202-DPB10101 DPA10202-DPB10201 DPA10202-DPB10202 DPA10202-DPB10401 DPA10202-DPB110601 DPA10202-DPB11901 DPA10202-DPB13101 DPA10202-DPB16501 DPA10301-DPB10101 DPA10301-DPB10201 DPA10301-DPB10202 DPA10301-DPB10401 DPA10301-DPB10402 DPA10301-DPB110501 DPA10301-DPB110601 DPA10301-DPB11801 DPA10301-DPB12301 DPA10301-DPB13901 DPA10301-DPB14001 DPA10301-DPB14901 DPA10301-DPB15501 DPA10301-DPB16501 DPA10301-DPB17501 DPA10301-DPB18001 DPA10401-DPB10101 DPA10401-DPB10201; note = HLAs: DPA10401-DPB10202 DPA10401-DPB10402 DPA10401-DPB10501 DPA10401-DPB110501 DPA10401-DPB14901
PPFLWEGMELVPDK

SEQ ID NO: 7032 - protein, 20 aa, synthetic construct
  source 1..20: note = Seed: KEPPFLWMGYELHPDKWTVQ; note = HLAs: DRB1_0101 DRB1_1001 DPA10103-DPB10101 DPA10103-DPB10201 DPA10103-DPB10202 DPA10103-DPB10401 DPA10103-DPB10402 DPA10103-DPB10501 DPA10103-DPB110501 DPA10103-DPB112601 DPA10103-DPB11501 DPA10103-DPB11601 DPA10103-DPB11801 DPA10103-DPB11901 DPA10103-DPB12301 DPA10103-DPB13101 DPA10103-DPB13401 DPA10103-DPB13901 DPA10103-DPB14001 DPA10103-DPB14101 DPA10103-DPB14801 DPA10103-DPB14901 DPA10103-DPB15001 DPA10103-DPB15101 DPA10103-DPB15501 DPA10103-DPB15901 DPA10103-DPB18001 DPA10104-DPB10101 DPA10104-DPB11501 DPA10105-DPB10101 DPA10105-DPB10401 DPA10105-DPB11801 DPA10105-DPB15001 DPA10106-DPB10101 DPA10201-DPB10101 DPA10201-DPB10201 DPA10201-DPB10202 DPA10201-DPB10401 DPA10201-DPB10501 DPA10201-DPB110601 DPA10201-DPB11501 DPA10201-DPB11601 DPA10201-DPB11901 DPA10201-DPB13401 DPA10201-DPB15501 DPA10202-DPB10101 DPA10202-DPB10201 DPA10202-DPB10202 DPA10202-DPB10401 DPA10202-DPB10501 DPA10202-DPB110601 DPA10202-DPB11101 DPA10202-DPB11301 DPA10202-DPB11801 DPA10202-DPB11901; note = HLAs: DPA10202-DPB13101 DPA10202-DPB13801 DPA10202-DPB15501 DPA10202-DPB16501 DPA10301-DPB10101 DPA10301-DPB10201 DPA10301-DPB10202 DPA10301-DPB10401 DPA10301-DPB10402 DPA10301-DPB110501 DPA10301-DPB110601 DPA10301-DPB11101 DPA10301-DPB11301 DPA10301-DPB11801 DPA10301-DPB12301 DPA10301-DPB13901 DPA10301-DPB14001 DPA10301-DPB14901 DPA10301-DPB15501 DPA10301-DPB16501 DPA10301-DPB17501 DPA10301-DPB18001 DPA10401-DPB10101 DPA10401-DPB10201 DPA10401-DPB10202 DPA10401-DPB10402 DPA10401-DPB10501 DPA10401-DPB110501 DPA10401-DPB14901
KEPPFLWNGIELVPDKWTVQ

SEQ ID NO: 7033 - protein, 14 aa, synthetic construct
  source 1..14: note = Seed: PPFLWMGYELHPDK; note = HLAs: DPA10103-DPB10101 DPA10103-DPB10201 DPA10103-DPB10202 DPA10103-DPB10401 DPA10103-DPB112601 DPA10103-DPB11501 DPA10103-DPB11601 DPA10103-DPB11901 DPA10103-DPB12301 DPA10103-DPB13101 DPA10103-DPB13401 DPA10103-DPB13901 DPA10103-DPB14001 DPA10103-DPB14101 DPA10103-DPB14801 DPA10103-DPB15001 DPA10103-DPB15901 DPA10104-DPB10101 DPA10104-DPB11501 DPA10105-DPB10101 DPA10105-DPB10401 DPA10105-DPB15001 DPA10106-DPB10101 DPA10201-DPB10101 DPA10201-DPB110601 DPA10201-DPB11501 DPA10201-DPB11601 DPA10201-DPB11901 DPA10202-DPB10101 DPA10202-DPB10201 DPA10202-DPB10202 DPA10202-DPB10401 DPA10202-DPB110601 DPA10202-DPB11901 DPA10202-DPB13101 DPA10202-DPB16501 DPA10301-DPB10101 DPA10301-DPB10201 DPA10301-DPB10202 DPA10301-DPB10401 DPA10301-DPB10402 DPA10301-DPB110501 DPA10301-DPB110601 DPA10301-DPB11801 DPA10301-DPB12301 DPA10301-DPB13901 DPA10301-DPB14001 DPA10301-DPB14901 DPA10301-DPB15501 DPA10301-DPB16501 DPA10301-DPB17501 DPA10301-DPB18001 DPA10401-DPB10101 DPA10401-DPB10201; note = HLAs: DPA10401-DPB10202 DPA10401-DPB10402 DPA10401-DPB10501 DPA10401-DPB110501 DPA10401-DPB14901
PPYLWVGFELEPDK

SEQ ID NO: 7034 - protein, 20 aa, synthetic construct
  source 1..20: note = Seed: KEPPFLWMGYELHPDKWTVQ; note = HLAs: DPA10103-DPB10101 DPA10103-DPB10201 DPA10103-DPB10202 DPA10103-DPB10401 DPA10103-DPB10402 DPA10103-DPB10501 DPA10103-DPB110501 DPA10103-DPB112601 DPA10103-DPB11501 DPA10103-DPB11601 DPA10103-DPB11801 DPA10103-DPB11901 DPA10103-DPB12301 DPA10103-DPB13101 DPA10103-DPB13401 DPA10103-DPB13901 DPA10103-DPB14001 DPA10103-DPB14101 DPA10103-DPB14801 DPA10103-DPB14901 DPA10103-DPB15001 DPA10103-DPB15101 DPA10103-DPB15501 DPA10103-DPB15901 DPA10103-DPB18001 DPA10104-DPB10101 DPA10104-DPB11501 DPA10105-DPB10101 DPA10105-DPB10401 DPA10105-DPB11801 DPA10105-DPB15001 DPA10106-DPB10101 DPA10201-DPB10101 DPA10201-DPB10201 DPA10201-DPB10202 DPA10201-DPB10401 DPA10201-DPB10501 DPA10201-DPB110601 DPA10201-DPB11501 DPA10201-DPB11601 DPA10201-DPB11901 DPA10201-DPB13401 DPA10201-DPB15501 DPA10202-DPB10101 DPA10202-DPB10201 DPA10202-DPB10202 DPA10202-DPB10401 DPA10202-DPB10501 DPA10202-DPB110601 DPA10202-DPB11101 DPA10202-DPB11301 DPA10202-DPB11801 DPA10202-DPB11901 DPA10202-DPB13101 DPA10202-DPB13801; note = HLAs: DPA10202-DPB15501 DPA10202-DPB16501 DPA10301-DPB10101 DPA10301-DPB10201 DPA10301-DPB10202 DPA10301-DPB10401 DPA10301-DPB10402 DPA10301-DPB110501 DPA10301-DPB110601 DPA10301-DPB11101 DPA10301-DPB11301 DPA10301-DPB11801 DPA10301-DPB12301 DPA10301-DPB13901 DPA10301-DPB14001 DPA10301-DPB14901 DPA10301-DPB15501 DPA10301-DPB16501 DPA10301-DPB17501 DPA10301-DPB18001 DPA10401-DPB10101 DPA10401-DPB10201 DPA10401-DPB10202 DPA10401-DPB10402 DPA10401-DPB10501 DPA10401-DPB110501 DPA10401-DPB14901
KEPPMLWMGFELLPDKWTVQ

SEQ ID NO: 7035 - protein, 20 aa, synthetic construct
  source 1..20: note = Seed: KEPPFLWMGYELHPDKWTVQ; note = HLAs: DRB1_0101 DRB1_1001 DPA10103-DPB10201 DPA10103-DPB10202 DPA10103-DPB10401 DPA10103-DPB10402 DPA10103-DPB10501 DPA10103-DPB110501 DPA10103-DPB112601 DPA10103-DPB11501 DPA10103-DPB11601 DPA10103-DPB11801 DPA10103-DPB11901 DPA10103-DPB12301 DPA10103-DPB13401 DPA10103-DPB13901 DPA10103-DPB14001 DPA10103-DPB14101 DPA10103-DPB14801 DPA10103-DPB14901 DPA10103-DPB15101 DPA10103-DPB15501 DPA10103-DPB15901 DPA10103-DPB18001 DPA10104-DPB11501 DPA10105-DPB10401 DPA10105-DPB11801 DPA10106-DPB10101 DPA10201-DPB10101 DPA10201-DPB10201 DPA10201-DPB10202 DPA10201-DPB10401 DPA10201-DPB10501 DPA10201-DPB110601 DPA10201-DPB11501 DPA10201-DPB11601 DPA10201-DPB11901 DPA10201-DPB13401 DPA10201-DPB15501 DPA10202-DPB10101 DPA10202-DPB10201 DPA10202-DPB10202 DPA10202-DPB10401 DPA10202-DPB10501 DPA10202-DPB110601 DPA10202-DPB11301 DPA10202-DPB11801 DPA10202-DPB11901 DPA10202-DPB13101 DPA10202-DPB13801 DPA10202-DPB15501 DPA10202-DPB16501 DPA10301-DPB10101 DPA10301-DPB10201 DPA10301-DPB10202; note = HLAs: DPA10301-DPB10401 DPA10301-DPB10402 DPA10301-DPB110501 DPA10301-DPB110601 DPA10301-DPB11301 DPA10301-DPB11801 DPA10301-DPB12301 DPA10301-DPB13901 DPA10301-DPB14001 DPA10301-DPB14901 DPA10301-DPB15501 DPA10301-DPB16501 DPA10301-DPB17501 DPA10301-DPB18001 DPA10401-DPB10201 DPA10401-DPB10202 DPA10401-DPB10402 DPA10401-DPB10501 DPA10401-DPB110501 DPA10401-DPB14901
KEPPFLWWGLELLPDKWTVQ

SEQ ID NO: 7036 - protein, 14 aa, synthetic construct
  source 1..14: note = Seed: PPFLWMGYELHPDK; note = HLAs: DPA10103-DPB10101 DPA10103-DPB10201 DPA10103-DPB10202 DPA10103-DPB10401 DPA10103-DPB112601 DPA10103-DPB11501 DPA10103-DPB11601 DPA10103-DPB11901 DPA10103-DPB12301 DPA10103-DPB13101 DPA10103-DPB13401 DPA10103-DPB13901 DPA10103-DPB14001 DPA10103-DPB14101 DPA10103-DPB14801 DPA10103-DPB15001 DPA10103-DPB15901 DPA10104-DPB10101 DPA10104-DPB11501 DPA10105-DPB10101 DPA10105-DPB10401 DPA10105-DPB15001 DPA10106-DPB10101 DPA10201-DPB10101 DPA10201-DPB110601 DPA10201-DPB11501 DPA10201-DPB11601 DPA10201-DPB11901 DPA10202-DPB10101 DPA10202-DPB10201 DPA10202-DPB10202 DPA10202-DPB10401 DPA10202-DPB110601 DPA10202-DPB11901 DPA10202-DPB13101 DPA10202-DPB16501 DPA10301-DPB10101 DPA10301-DPB10201 DPA10301-DPB10202 DPA10301-DPB10401 DPA10301-DPB10402 DPA10301-DPB110501 DPA10301-DPB110601 DPA10301-DPB11801 DPA10301-DPB12301 DPA10301-DPB13901 DPA10301-DPB14001 DPA10301-DPB14901 DPA10301-DPB15501 DPA10301-DPB16501 DPA10301-DPB17501 DPA10301-DPB18001 DPA10401-DPB10101 DPA10401-DPB10201; note = HLAs: DPA10401-DPB10202 DPA10401-DPB10402 DPA10401-DPB10501 DPA10401-DPB110501 DPA10401-DPB14901
PPILWIGFELTPDK

SEQ ID NO: 7037 - protein, 20 aa, synthetic construct
  source 1..20: note = Seed: KEPPFLWMGYELHPDKWTVQ; note = HLAs: DRB1_0101 DRB1_1001 DPA10103-DPB10101 DPA10103-DPB10201 DPA10103-DPB10202 DPA10103-DPB10401 DPA10103-DPB10402 DPA10103-DPB10501 DPA10103-DPB110501 DPA10103-DPB112601 DPA10103-DPB11501 DPA10103-DPB11601 DPA10103-DPB11801 DPA10103-DPB11901 DPA10103-DPB12301 DPA10103-DPB13101 DPA10103-DPB13401 DPA10103-DPB13901 DPA10103-DPB14001 DPA10103-DPB14101 DPA10103-DPB14801 DPA10103-DPB14901 DPA10103-DPB15001 DPA10103-DPB15101 DPA10103-DPB15501 DPA10103-DPB15901 DPA10103-DPB18001 DPA10104-DPB10101 DPA10104-DPB11501 DPA10105-DPB10101 DPA10105-DPB10401 DPA10105-DPB11801 DPA10105-DPB15001 DPA10106-DPB10101 DPA10201-DPB10101 DPA10201-DPB10201 DPA10201-DPB10202 DPA10201-DPB10401 DPA10201-DPB10501 DPA10201-DPB110601 DPA10201-DPB11501 DPA10201-DPB11601 DPA10201-DPB11901 DPA10201-DPB13401 DPA10201-DPB15501 DPA10202-DPB10101 DPA10202-DPB10201 DPA10202-DPB10202 DPA10202-DPB10401 DPA10202-DPB10501 DPA10202-DPB110601 DPA10202-DPB11101 DPA10202-DPB11301 DPA10202-DPB11801 DPA10202-DPB11901; note = HLAs: DPA10202-DPB13101 DPA10202-DPB13801 DPA10202-DPB15501 DPA10202-DPB16501 DPA10301-DPB10101 DPA10301-DPB10201 DPA10301-DPB10202 DPA10301-DPB10401 DPA10301-DPB10402 DPA10301-DPB110501 DPA10301-DPB110601 DPA10301-DPB11101 DPA10301-DPB11301 DPA10301-DPB11801 DPA10301-DPB12301 DPA10301-DPB13901 DPA10301-DPB14001 DPA10301-DPB14901 DPA10301-DPB15501 DPA10301-DPB16501 DPA10301-DPB17501 DPA10301-DPB18001 DPA10401-DPB10101 DPA10401-DPB10201 DPA10401-DPB10202 DPA10401-DPB10402 DPA10401-DPB10501 DPA10401-DPB110501 DPA10401-DPB14901
KEPPFLWSGLELTPDKWTVQ

SEQ ID NO: 7038 - protein, 20 aa, synthetic construct
  source 1..20: note = Seed: KEPPFLWMGYELHPDKWTVQ; note = HLAs: DRB1_0101 DPA10103-DPB10101 DPA10103-DPB10201 DPA10103-DPB10202 DPA10103-DPB10401 DPA10103-DPB10402 DPA10103-DPB10501 DPA10103-DPB110501 DPA10103-DPB112601 DPA10103-DPB11501 DPA10103-DPB11601 DPA10103-DPB11801 DPA10103-DPB11901 DPA10103-DPB12301 DPA10103-DPB13101 DPA10103-DPB13401 DPA10103-DPB13901 DPA10103-DPB14001 DPA10103-DPB14101 DPA10103-DPB14801 DPA10103-DPB14901 DPA10103-DPB15001 DPA10103-DPB15101 DPA10103-DPB15501 DPA10103-DPB15901 DPA10103-DPB18001 DPA10104-DPB10101 DPA10104-DPB11501 DPA10105-DPB10101 DPA10105-DPB10401 DPA10105-DPB11801 DPA10105-DPB15001 DPA10106-DPB10101 DPA10201-DPB10101 DPA10201-DPB10201 DPA10201-DPB10202 DPA10201-DPB10401 DPA10201-DPB10501 DPA10201-DPB110601 DPA10201-DPB11501 DPA10201-DPB11601 DPA10201-DPB11901 DPA10201-DPB13401 DPA10201-DPB15501 DPA10202-DPB10101 DPA10202-DPB10201 DPA10202-DPB10202 DPA10202-DPB10401 DPA10202-DPB10501 DPA10202-DPB110601 DPA10202-DPB11101 DPA10202-DPB11301 DPA10202-DPB11801 DPA10202-DPB11901 DPA10202-DPB13101; note = HLAs: DPA10202-DPB13801 DPA10202-DPB15501 DPA10202-DPB16501 DPA10301-DPB10101 DPA10301-DPB10201 DPA10301-DPB10202 DPA10301-DPB10401 DPA10301-DPB10402 DPA10301-DPB110501 DPA10301-DPB110601 DPA10301-DPB11101 DPA10301-DPB11301 DPA10301-DPB11801 DPA10301-DPB12301 DPA10301-DPB13901 DPA10301-DPB14001 DPA10301-DPB14901 DPA10301-DPB15501 DPA10301-DPB16501 DPA10301-DPB17501 DPA10301-DPB18001 DPA10401-DPB10101 DPA10401-DPB10201 DPA10401-DPB10202 DPA10401-DPB10402 DPA10401-DPB10501 DPA10401-DPB110501 DPA10401-DPB14901
KEPPFLWKGLELVPDKWTVQ

SEQ ID NO: 7039 - protein, 14 aa, synthetic construct
  source 1..14: note = Seed: PPFLWMGYELHPDK; note = HLAs: DPA10103-DPB10101 DPA10103-DPB10201 DPA10103-DPB10202 DPA10103-DPB10401 DPA10103-DPB112601 DPA10103-DPB11501 DPA10103-DPB11601 DPA10103-DPB11901 DPA10103-DPB12301 DPA10103-DPB13101 DPA10103-DPB13401 DPA10103-DPB13901 DPA10103-DPB14001 DPA10103-DPB14101 DPA10103-DPB14801 DPA10103-DPB15001 DPA10103-DPB15901 DPA10104-DPB10101 DPA10104-DPB11501 DPA10105-DPB10101 DPA10105-DPB10401 DPA10105-DPB15001 DPA10106-DPB10101 DPA10201-DPB10101 DPA10201-DPB110601 DPA10201-DPB11501 DPA10201-DPB11601 DPA10201-DPB11901 DPA10202-DPB10101 DPA10202-DPB10201 DPA10202-DPB10202 DPA10202-DPB10401 DPA10202-DPB110601 DPA10202-DPB11901 DPA10202-DPB13101 DPA10202-DPB16501 DPA10301-DPB10101 DPA10301-DPB10201 DPA10301-DPB10202 DPA10301-DPB10401 DPA10301-DPB10402 DPA10301-DPB110501 DPA10301-DPB110601 DPA10301-DPB11801 DPA10301-DPB12301 DPA10301-DPB13901 DPA10301-DPB14001 DPA10301-DPB14901 DPA10301-DPB15501 DPA10301-DPB16501 DPA10301-DPB17501 DPA10301-DPB18001 DPA10401-DPB10101 DPA10401-DPB10201; note = HLAs: DPA10401-DPB10202 DPA10401-DPB10402 DPA10401-DPB10501 DPA10401-DPB110501 DPA10401-DPB14901
PPFLWSGFELKPDK

SEQ ID NO: 7040 - protein, 20 aa, synthetic construct
  source 1..20: note = Seed: KEPPFLWMGYELHPDKWTVQ; note = HLAs: DRB1_1001 DPA10103-DPB10101 DPA10103-DPB10201 DPA10103-DPB10202 DPA10103-DPB10401 DPA10103-DPB10402 DPA10103-DPB10501 DPA10103-DPB110501 DPA10103-DPB112601 DPA10103-DPB11501 DPA10103-DPB11601 DPA10103-DPB11801 DPA10103-DPB11901 DPA10103-DPB12301 DPA10103-DPB13101 DPA10103-DPB13401 DPA10103-DPB13901 DPA10103-DPB14001 DPA10103-DPB14101 DPA10103-DPB14801 DPA10103-DPB14901 DPA10103-DPB15001 DPA10103-DPB15101 DPA10103-DPB15501 DPA10103-DPB15901 DPA10103-DPB18001 DPA10104-DPB10101 DPA10104-DPB11501 DPA10105-DPB10101 DPA10105-DPB10401 DPA10105-DPB11801 DPA10105-DPB15001 DPA10106-DPB10101 DPA10201-DPB10101 DPA10201-DPB10201 DPA10201-DPB10202 DPA10201-DPB10401 DPA10201-DPB10501 DPA10201-DPB110601 DPA10201-DPB11501 DPA10201-DPB11601 DPA10201-DPB11901 DPA10201-DPB13401 DPA10201-DPB15501 DPA10202-DPB10101 DPA10202-DPB10201 DPA10202-DPB10202 DPA10202-DPB10401 DPA10202-DPB10501 DPA10202-DPB110601 DPA10202-DPB11101 DPA10202-DPB11301 DPA10202-DPB11801 DPA10202-DPB11901 DPA10202-DPB13101; note = HLAs: DPA10202-DPB13801 DPA10202-DPB15501 DPA10202-DPB16501 DPA10301-DPB10101 DPA10301-DPB10201 DPA10301-DPB10202 DPA10301-DPB10401 DPA10301-DPB10402 DPA10301-DPB110501 DPA10301-DPB110601 DPA10301-DPB11101 DPA10301-DPB11301 DPA10301-DPB11801 DPA10301-DPB12301 DPA10301-DPB13901 DPA10301-DPB14001 DPA10301-DPB14901 DPA10301-DPB15501 DPA10301-DPB16501 DPA10301-DPB17501 DPA10301-DPB18001 DPA10401-DPB10101 DPA10401-DPB10201 DPA10401-DPB10202 DPA10401-DPB10402 DPA10401-DPB10501 DPA10401-DPB110501 DPA10401-DPB14901
KEPPFLWTGWELNPDKWTVQ

SEQ ID NO: 7041 - protein, 20 aa, synthetic construct
  source 1..20: note = Seed: KEPPFLWMGYELHPDKWTVQ; note = HLAs: DRB1_0101 DRB1_0405 DRB1_1001 DPA10103-DPB10101 DPA10103-DPB10201 DPA10103-DPB10202 DPA10103-DPB10401 DPA10103-DPB10402 DPA10103-DPB10501 DPA10103-DPB110501 DPA10103-DPB112601 DPA10103-DPB11501 DPA10103-DPB11801 DPA10103-DPB11901 DPA10103-DPB12301 DPA10103-DPB13401 DPA10103-DPB13901 DPA10103-DPB14001 DPA10103-DPB14101 DPA10103-DPB14801 DPA10103-DPB14901 DPA10103-DPB15101 DPA10103-DPB15501 DPA10103-DPB15901 DPA10103-DPB18001 DPA10104-DPB10101 DPA10104-DPB11501 DPA10105-DPB10101 DPA10105-DPB10401 DPA10105-DPB11801 DPA10106-DPB10101 DPA10201-DPB10101 DPA10201-DPB10201 DPA10201-DPB10202 DPA10201-DPB10401 DPA10201-DPB10501 DPA10201-DPB110601 DPA10201-DPB11501 DPA10201-DPB11601 DPA10201-DPB11901 DPA10201-DPB13401 DPA10201-DPB15501 DPA10202-DPB10101 DPA10202-DPB10201 DPA10202-DPB10202 DPA10202-DPB10401 DPA10202-DPB10501 DPA10202-DPB110601 DPA10202-DPB11101 DPA10202-DPB11301 DPA10202-DPB11801 DPA10202-DPB11901 DPA10202-DPB13101 DPA10202-DPB13801 DPA10202-DPB15501 DPA10202-DPB16501; note = HLAs: DPA10301-DPB10101 DPA10301-DPB10201 DPA10301-DPB10202 DPA10301-DPB10401 DPA10301-DPB10402 DPA10301-DPB110501 DPA10301-DPB110601 DPA10301-DPB11101 DPA10301-DPB11301 DPA10301-DPB11801 DPA10301-DPB12301 DPA10301-DPB13901 DPA10301-DPB14001 DPA10301-DPB14901 DPA10301-DPB15501 DPA10301-DPB16501 DPA10301-DPB17501 DPA10301-DPB18001 DPA10401-DPB10101 DPA10401-DPB10201 DPA10401-DPB10202 DPA10401-DPB10402 DPA10401-DPB10501 DPA10401-DPB110501 DPA10401-DPB14901
KEPPFLWIGVELLPDKWTVQ

SEQ ID NO: 7042 - protein, 20 aa, synthetic construct
  source 1..20: note = Seed: KEPPFLWMGYELHPDKWTVQ; note = HLAs: DPA10103-DPB10101 DPA10103-DPB10201 DPA10103-DPB10202 DPA10103-DPB10401 DPA10103-DPB10402 DPA10103-DPB10501 DPA10103-DPB110501 DPA10103-DPB112601 DPA10103-DPB11501 DPA10103-DPB11601 DPA10103-DPB11801 DPA10103-DPB11901 DPA10103-DPB12301 DPA10103-DPB13101 DPA10103-DPB13401 DPA10103-DPB13901 DPA10103-DPB14001 DPA10103-DPB14101 DPA10103-DPB14801 DPA10103-DPB14901 DPA10103-DPB15001 DPA10103-DPB15101 DPA10103-DPB15501 DPA10103-DPB15901 DPA10103-DPB18001 DPA10104-DPB10101 DPA10104-DPB11501 DPA10105-DPB10101 DPA10105-DPB10401 DPA10105-DPB11801 DPA10105-DPB15001 DPA10106-DPB10101 DPA10201-DPB10101 DPA10201-DPB10201 DPA10201-DPB10202 DPA10201-DPB10401 DPA10201-DPB10501 DPA10201-DPB110601 DPA10201-DPB11501 DPA10201-DPB11601 DPA10201-DPB11901 DPA10201-DPB13401 DPA10201-DPB15501 DPA10202-DPB10101 DPA10202-DPB10201 DPA10202-DPB10202 DPA10202-DPB10401 DPA10202-DPB10501 DPA10202-DPB110601 DPA10202-DPB11101 DPA10202-DPB11301 DPA10202-DPB11801 DPA10202-DPB11901 DPA10202-DPB13101 DPA10202-DPB13801; note = HLAs: DPA10202-DPB15501 DPA10202-DPB16501 DPA10301-DPB10101 DPA10301-DPB10201 DPA10301-DPB10202 DPA10301-DPB10401 DPA10301-DPB10402 DPA10301-DPB110501 DPA10301-DPB110601 DPA10301-DPB11101 DPA10301-DPB11301 DPA10301-DPB11801 DPA10301-DPB12301 DPA10301-DPB13901 DPA10301-DPB14001 DPA10301-DPB14901 DPA10301-DPB15501 DPA10301-DPB16501 DPA10301-DPB17501 DPA10301-DPB18001 DPA10401-DPB10101 DPA10401-DPB10201 DPA10401-DPB10202 DPA10401-DPB10402 DPA10401-DPB10501 DPA10401-DPB110501 DPA10401-DPB14901
KEPPVLWTGFELFPDKWTVQ

SEQ ID NO: 7043 - protein, 14 aa, synthetic construct
  source 1..14: note = Seed: PPFLWMGYELHPDK; note = HLAs: DPA10103-DPB10101 DPA10103-DPB10201 DPA10103-DPB10202 DPA10103-DPB10401 DPA10103-DPB112601 DPA10103-DPB11501 DPA10103-DPB11601 DPA10103-DPB11901 DPA10103-DPB12301 DPA10103-DPB13101 DPA10103-DPB13401 DPA10103-DPB13901 DPA10103-DPB14001 DPA10103-DPB14101 DPA10103-DPB14801 DPA10103-DPB15001 DPA10103-DPB15901 DPA10104-DPB10101 DPA10104-DPB11501 DPA10105-DPB10101 DPA10105-DPB10401 DPA10105-DPB15001 DPA10106-DPB10101 DPA10201-DPB10101 DPA10201-DPB110601 DPA10201-DPB11501 DPA10201-DPB11601 DPA10201-DPB11901 DPA10202-DPB10101 DPA10202-DPB10201 DPA10202-DPB10202 DPA10202-DPB10401 DPA10202-DPB110601 DPA10202-DPB11901 DPA10202-DPB13101 DPA10202-DPB16501 DPA10301-DPB10101 DPA10301-DPB10201 DPA10301-DPB10202 DPA10301-DPB10401 DPA10301-DPB10402 DPA10301-DPB110501 DPA10301-DPB110601 DPA10301-DPB11801 DPA10301-DPB12301 DPA10301-DPB13901 DPA10301-DPB14001 DPA10301-DPB14901 DPA10301-DPB15501 DPA10301-DPB16501 DPA10301-DPB17501 DPA10301-DPB18001 DPA10401-DPB10101 DPA10401-DPB10201; note = HLAs: DPA10401-DPB10202 DPA10401-DPB10402 DPA10401-DPB10501 DPA10401-DPB110501 DPA10401-DPB14901
PPFLWKGFELSPDK

SEQ ID NO: 7044 - protein, 20 aa, synthetic construct
  source 1..20: note = Seed: KEPPFLWMGYELHPDKWTVQ; note = HLAs: DPA10103-DPB10101 DPA10103-DPB10201 DPA10103-DPB10202 DPA10103-DPB10401 DPA10103-DPB10402 DPA10103-DPB10501 DPA10103-DPB110501 DPA10103-DPB112601 DPA10103-DPB11501 DPA10103-DPB11601 DPA10103-DPB11801 DPA10103-DPB11901 DPA10103-DPB12301 DPA10103-DPB13101 DPA10103-DPB13401 DPA10103-DPB13901 DPA10103-DPB14001 DPA10103-DPB14101 DPA10103-DPB14801 DPA10103-DPB14901 DPA10103-DPB15001 DPA10103-DPB15101 DPA10103-DPB15501 DPA10103-DPB15901 DPA10103-DPB18001 DPA10104-DPB10101 DPA10104-DPB11501 DPA10105-DPB10101 DPA10105-DPB10401 DPA10105-DPB11801 DPA10105-DPB15001 DPA10106-DPB10101 DPA10201-DPB10101 DPA10201-DPB10201 DPA10201-DPB10202 DPA10201-DPB10401 DPA10201-DPB10501 DPA10201-DPB110601 DPA10201-DPB11501 DPA10201-DPB11601 DPA10201-DPB11901 DPA10201-DPB13401 DPA10201-DPB15501 DPA10202-DPB10101 DPA10202-DPB10201 DPA10202-DPB10202 DPA10202-DPB10401 DPA10202-DPB10501 DPA10202-DPB110601 DPA10202-DPB11101 DPA10202-DPB11301 DPA10202-DPB11801 DPA10202-DPB11901 DPA10202-DPB13101 DPA10202-DPB13801; note = HLAs: DPA10202-DPB15501 DPA10202-DPB16501 DPA10301-DPB10101 DPA10301-DPB10201 DPA10301-DPB10202 DPA10301-DPB10401 DPA10301-DPB10402 DPA10301-DPB110501 DPA10301-DPB110601 DPA10301-DPB11101 DPA10301-DPB11301 DPA10301-DPB11801 DPA10301-DPB12301 DPA10301-DPB13901 DPA10301-DPB14001 DPA10301-DPB14901 DPA10301-DPB15501 DPA10301-DPB16501 DPA10301-DPB17501 DPA10301-DPB18001 DPA10401-DPB10101 DPA10401-DPB10201 DPA10401-DPB10202 DPA10401-DPB10402 DPA10401-DPB10501 DPA10401-DPB110501 DPA10401-DPB14901
KEPPLLWIGFELYPDKWTVQ

SEQ ID NO: 7045 - protein, 20 aa, synthetic construct
  source 1..20: note = Seed: KEPPFLWMGYELHPDKWTVQ; note = HLAs: DRB1_1001 DPA10103-DPB10101 DPA10103-DPB10201 DPA10103-DPB10202 DPA10103-DPB10401 DPA10103-DPB10402 DPA10103-DPB10501 DPA10103-DPB110501 DPA10103-DPB112601 DPA10103-DPB11501 DPA10103-DPB11601 DPA10103-DPB11801 DPA10103-DPB11901 DPA10103-DPB12301 DPA10103-DPB13101 DPA10103-DPB13401 DPA10103-DPB13901 DPA10103-DPB14001 DPA10103-DPB14101 DPA10103-DPB14801 DPA10103-DPB14901 DPA10103-DPB15001 DPA10103-DPB15101 DPA10103-DPB15501 DPA10103-DPB15901 DPA10103-DPB18001 DPA10104-DPB10101 DPA10104-DPB11501 DPA10105-DPB10101 DPA10105-DPB10401 DPA10105-DPB11801 DPA10105-DPB15001 DPA10106-DPB10101 DPA10201-DPB10101 DPA10201-DPB10201 DPA10201-DPB10202 DPA10201-DPB10401 DPA10201-DPB10501 DPA10201-DPB110601 DPA10201-DPB11501 DPA10201-DPB11601 DPA10201-DPB11901 DPA10201-DPB13401 DPA10201-DPB15501 DPA10202-DPB10101 DPA10202-DPB10201 DPA10202-DPB10202 DPA10202-DPB10401 DPA10202-DPB10501 DPA10202-DPB110601 DPA10202-DPB11101 DPA10202-DPB11301 DPA10202-DPB11801 DPA10202-DPB11901 DPA10202-DPB13101; note = HLAs: DPA10202-DPB13801 DPA10202-DPB15501 DPA10202-DPB16501 DPA10301-DPB10101 DPA10301-DPB10201 DPA10301-DPB10202 DPA10301-DPB10401 DPA10301-DPB10402 DPA10301-DPB110501 DPA10301-DPB110601 DPA10301-DPB11101 DPA10301-DPB11301 DPA10301-DPB11801 DPA10301-DPB12301 DPA10301-DPB13901 DPA10301-DPB14001 DPA10301-DPB14901 DPA10301-DPB15501 DPA10301-DPB16501 DPA10301-DPB17501 DPA10301-DPB18001 DPA10401-DPB10101 DPA10401-DPB10201 DPA10401-DPB10202 DPA10401-DPB10402 DPA10401-DPB10501 DPA10401-DPB110501 DPA10401-DPB14901
KEPPFLWLGFELDPDKWTVQ

SEQ ID NO: 7046 - protein, 14 aa, synthetic construct
  source 1..14: note = Seed: PPFLWMGYELHPDK; note = HLAs: DPA10103-DPB10101 DPA10103-DPB10201 DPA10103-DPB10202 DPA10103-DPB10401 DPA10103-DPB112601 DPA10103-DPB11501 DPA10103-DPB11601 DPA10103-DPB11901 DPA10103-DPB12301 DPA10103-DPB13101 DPA10103-DPB13401 DPA10103-DPB13901 DPA10103-DPB14001 DPA10103-DPB14101 DPA10103-DPB14801 DPA10103-DPB15001 DPA10103-DPB15901 DPA10104-DPB10101 DPA10104-DPB11501 DPA10105-DPB10101 DPA10105-DPB10401 DPA10105-DPB15001 DPA10106-DPB10101 DPA10201-DPB10101 DPA10201-DPB110601 DPA10201-DPB11501 DPA10201-DPB11601 DPA10201-DPB11901 DPA10202-DPB10101 DPA10202-DPB10201 DPA10202-DPB10202 DPA10202-DPB10401 DPA10202-DPB110601 DPA10202-DPB11901 DPA10202-DPB13101 DPA10202-DPB16501 DPA10301-DPB10101 DPA10301-DPB10201 DPA10301-DPB10202 DPA10301-DPB10401 DPA10301-DPB10402 DPA10301-DPB110501 DPA10301-DPB110601 DPA10301-DPB11801 DPA10301-DPB12301 DPA10301-DPB13901 DPA10301-DPB14001 DPA10301-DPB14901 DPA10301-DPB15501 DPA10301-DPB16501 DPA10301-DPB17501 DPA10301-DPB18001 DPA10401-DPB10101 DPA10401-DPB10201; note = HLAs: DPA10401-DPB10202 DPA10401-DPB10402 DPA10401-DPB10501 DPA10401-DPB110501 DPA10401-DPB14901
PPFLWSGWELTPDK

SEQ ID NO: 7047 - protein, 20 aa, synthetic construct
  source 1..20: note = Seed: KEPPFLWMGYELHPDKWTVQ; note = HLAs: DPA10103-DPB10101 DPA10103-DPB10201 DPA10103-DPB10202 DPA10103-DPB10401 DPA10103-DPB10402 DPA10103-DPB10501 DPA10103-DPB110501 DPA10103-DPB112601 DPA10103-DPB11501 DPA10103-DPB11601 DPA10103-DPB11801 DPA10103-DPB11901 DPA10103-DPB12301 DPA10103-DPB13101 DPA10103-DPB13401 DPA10103-DPB13901 DPA10103-DPB14001 DPA10103-DPB14101 DPA10103-DPB14801 DPA10103-DPB14901 DPA10103-DPB15001 DPA10103-DPB15101 DPA10103-DPB15501 DPA10103-DPB15901 DPA10103-DPB18001 DPA10104-DPB10101 DPA10104-DPB11501 DPA10105-DPB10101 DPA10105-DPB10401 DPA10105-DPB11801 DPA10105-DPB15001 DPA10106-DPB10101 DPA10201-DPB10101 DPA10201-DPB10201 DPA10201-DPB10202 DPA10201-DPB10401 DPA10201-DPB10501 DPA10201-DPB110601 DPA10201-DPB11501 DPA10201-DPB11601 DPA10201-DPB11901 DPA10201-DPB13401 DPA10201-DPB15501 DPA10202-DPB10101 DPA10202-DPB10201 DPA10202-DPB10202 DPA10202-DPB10401 DPA10202-DPB10501 DPA10202-DPB110601 DPA10202-DPB11101 DPA10202-DPB11301 DPA10202-DPB11801 DPA10202-DPB11901 DPA10202-DPB13101 DPA10202-DPB13801; note = HLAs: DPA10202-DPB15501 DPA10202-DPB16501 DPA10301-DPB10101 DPA10301-DPB10201 DPA10301-DPB10202 DPA10301-DPB10401 DPA10301-DPB10402 DPA10301-DPB110501 DPA10301-DPB110601 DPA10301-DPB11101 DPA10301-DPB11301 DPA10301-DPB11801 DPA10301-DPB12301 DPA10301-DPB13901 DPA10301-DPB14001 DPA10301-DPB14901 DPA10301-DPB15501 DPA10301-DPB16501 DPA10301-DPB17501 DPA10301-DPB18001 DPA10401-DPB10101 DPA10401-DPB10201 DPA10401-DPB10202 DPA10401-DPB10402 DPA10401-DPB10501 DPA10401-DPB110501 DPA10401-DPB14901
KEPPWLWQGFELMPDKWTVQ

SEQ ID NO: 7048 - protein, 20 aa, synthetic construct
  source 1..20: note = Seed: KEPPFLWMGYELHPDKWTVQ; note = HLAs: DPA10103-DPB10101 DPA10103-DPB10201 DPA10103-DPB10202 DPA10103-DPB10401 DPA10103-DPB10402 DPA10103-DPB10501 DPA10103-DPB110501 DPA10103-DPB112601 DPA10103-DPB11501 DPA10103-DPB11601 DPA10103-DPB11801 DPA10103-DPB11901 DPA10103-DPB12301 DPA10103-DPB13101 DPA10103-DPB13401 DPA10103-DPB13901 DPA10103-DPB14001 DPA10103-DPB14101 DPA10103-DPB14801 DPA10103-DPB14901 DPA10103-DPB15001 DPA10103-DPB15101 DPA10103-DPB15501 DPA10103-DPB15901 DPA10103-DPB18001 DPA10104-DPB10101 DPA10104-DPB11501 DPA10105-DPB10101 DPA10105-DPB10401 DPA10105-DPB11801 DPA10105-DPB15001 DPA10106-DPB10101 DPA10201-DPB10101 DPA10201-DPB10201 DPA10201-DPB10202 DPA10201-DPB10401 DPA10201-DPB10501 DPA10201-DPB110601 DPA10201-DPB11501 DPA10201-DPB11601 DPA10201-DPB11901 DPA10201-DPB13401 DPA10201-DPB15501 DPA10202-DPB10101 DPA10202-DPB10201 DPA10202-DPB10202 DPA10202-DPB10401 DPA10202-DPB10501 DPA10202-DPB110601 DPA10202-DPB11101 DPA10202-DPB11301 DPA10202-DPB11801 DPA10202-DPB11901 DPA10202-DPB13101 DPA10202-DPB13801; note = HLAs: DPA10202-DPB15501 DPA10202-DPB16501 DPA10301-DPB10101 DPA10301-DPB10201 DPA10301-DPB10202 DPA10301-DPB10401 DPA10301-DPB10402 DPA10301-DPB110501 DPA10301-DPB110601 DPA10301-DPB11101 DPA10301-DPB11301 DPA10301-DPB11801 DPA10301-DPB12301 DPA10301-DPB13901 DPA10301-DPB14001 DPA10301-DPB14901 DPA10301-DPB15501 DPA10301-DPB16501 DPA10301-DPB17501 DPA10301-DPB18001 DPA10401-DPB10101 DPA10401-DPB10201 DPA10401-DPB10202 DPA10401-DPB10402 DPA10401-DPB10501 DPA10401-DPB110501 DPA10401-DPB14901
KEPPLLWDGFELVPDKWTVQ

SEQ ID NO: 7049 - protein, 20 aa, synthetic construct
  source 1..20: note = Seed: KEPPFLWMGYELHPDKWTVQ; note = HLAs: DRB1_1001 DPA10103-DPB10101 DPA10103-DPB10201 DPA10103-DPB10202 DPA10103-DPB10401 DPA10103-DPB10402 DPA10103-DPB10501 DPA10103-DPB110501 DPA10103-DPB112601 DPA10103-DPB11501 DPA10103-DPB11601 DPA10103-DPB11801 DPA10103-DPB11901 DPA10103-DPB12301 DPA10103-DPB13101 DPA10103-DPB13401 DPA10103-DPB13901 DPA10103-DPB14001 DPA10103-DPB14101 DPA10103-DPB14801 DPA10103-DPB14901 DPA10103-DPB15001 DPA10103-DPB15101 DPA10103-DPB15501 DPA10103-DPB15901 DPA10103-DPB18001 DPA10104-DPB10101 DPA10104-DPB11501 DPA10105-DPB10101 DPA10105-DPB10401 DPA10105-DPB11801 DPA10105-DPB15001 DPA10106-DPB10101 DPA10201-DPB10101 DPA10201-DPB10201 DPA10201-DPB10202 DPA10201-DPB10401 DPA10201-DPB10501 DPA10201-DPB110601 DPA10201-DPB11501 DPA10201-DPB11601 DPA10201-DPB11901 DPA10201-DPB13401 DPA10201-DPB15501 DPA10202-DPB10101 DPA10202-DPB10201 DPA10202-DPB10202 DPA10202-DPB10401 DPA10202-DPB10501 DPA10202-DPB110601 DPA10202-DPB11101 DPA10202-DPB11301 DPA10202-DPB11801 DPA10202-DPB11901 DPA10202-DPB13101; note = HLAs: DPA10202-DPB13801 DPA10202-DPB15501 DPA10202-DPB16501 DPA10301-DPB10101 DPA10301-DPB10201 DPA10301-DPB10202 DPA10301-DPB10401 DPA10301-DPB10402 DPA10301-DPB110501 DPA10301-DPB110601 DPA10301-DPB11101 DPA10301-DPB11301 DPA10301-DPB11801 DPA10301-DPB12301 DPA10301-DPB13901 DPA10301-DPB14001 DPA10301-DPB14901 DPA10301-DPB15501 DPA10301-DPB16501 DPA10301-DPB17501 DPA10301-DPB18001 DPA10401-DPB10101 DPA10401-DPB10201 DPA10401-DPB10202 DPA10401-DPB10402 DPA10401-DPB10501 DPA10401-DPB110501 DPA10401-DPB14901
KEPPFLWNGFELEPDKWTVQ

SEQ ID NO: 7050 - protein, 14 aa, synthetic construct
  source 1..14: note = Seed: PPFLWMGYELHPDK; note = HLAs: DPA10103-DPB10101 DPA10103-DPB10201 DPA10103-DPB10202 DPA10103-DPB10401 DPA10103-DPB112601 DPA10103-DPB11501 DPA10103-DPB11601 DPA10103-DPB11901 DPA10103-DPB12301 DPA10103-DPB13101 DPA10103-DPB13401 DPA10103-DPB13901 DPA10103-DPB14001 DPA10103-DPB14101 DPA10103-DPB14801 DPA10103-DPB15001 DPA10103-DPB15901 DPA10104-DPB10101 DPA10104-DPB11501 DPA10105-DPB10101 DPA10105-DPB10401 DPA10105-DPB15001 DPA10106-DPB10101 DPA10201-DPB10101 DPA10201-DPB110601 DPA10201-DPB11501 DPA10201-DPB11601 DPA10201-DPB11901 DPA10202-DPB10101 DPA10202-DPB10201 DPA10202-DPB10202 DPA10202-DPB10401 DPA10202-DPB110601 DPA10202-DPB11901 DPA10202-DPB13101 DPA10202-DPB16501 DPA10301-DPB10101 DPA10301-DPB10201 DPA10301-DPB10202 DPA10301-DPB10401 DPA10301-DPB10402 DPA10301-DPB110501 DPA10301-DPB110601 DPA10301-DPB11801 DPA10301-DPB12301 DPA10301-DPB13901 DPA10301-DPB14001 DPA10301-DPB14901 DPA10301-DPB15501 DPA10301-DPB16501 DPA10301-DPB17501 DPA10301-DPB18001 DPA10401-DPB10101 DPA10401-DPB10201; note = HLAs: DPA10401-DPB10202 DPA10401-DPB10402 DPA10401-DPB10501 DPA10401-DPB110501 DPA10401-DPB14901
PPILWEGYELIPDK

SEQ ID NO: 7051 - protein, 20 aa, synthetic construct
  source 1..20: note = Seed: KEPPFLWMGYELHPDKWTVQ; note = HLAs: DRB1_0101 DRB1_0405 DRB1_1001 DPA10103-DPB10101 DPA10103-DPB10201 DPA10103-DPB10202 DPA10103-DPB10401 DPA10103-DPB10402 DPA10103-DPB10501 DPA10103-DPB110501 DPA10103-DPB112601 DPA10103-DPB11501 DPA10103-DPB11601 DPA10103-DPB11801 DPA10103-DPB11901 DPA10103-DPB12301 DPA10103-DPB13101 DPA10103-DPB13401 DPA10103-DPB13901 DPA10103-DPB14001 DPA10103-DPB14101 DPA10103-DPB14801 DPA10103-DPB14901 DPA10103-DPB15001 DPA10103-DPB15101 DPA10103-DPB15501 DPA10103-DPB15901 DPA10103-DPB18001 DPA10104-DPB10101 DPA10104-DPB11501 DPA10105-DPB10101 DPA10105-DPB10401 DPA10105-DPB11801 DPA10105-DPB15001 DPA10106-DPB10101 DPA10201-DPB10101 DPA10201-DPB10201 DPA10201-DPB10202 DPA10201-DPB10401 DPA10201-DPB10501 DPA10201-DPB110601 DPA10201-DPB11501 DPA10201-DPB11601 DPA10201-DPB11901 DPA10201-DPB13401 DPA10201-DPB15501 DPA10202-DPB10101 DPA10202-DPB10201 DPA10202-DPB10202 DPA10202-DPB10401 DPA10202-DPB10501 DPA10202-DPB110601 DPA10202-DPB11101 DPA10202-DPB11301 DPA10202-DPB11801 DPA10202-DPB11901; note = HLAs: DPA10202-DPB13101 DPA10202-DPB13801 DPA10202-DPB15501 DPA10202-DPB16501 DPA10301-DPB10101 DPA10301-DPB10201 DPA10301-DPB10202 DPA10301-DPB10401 DPA10301-DPB10402 DPA10301-DPB110501 DPA10301-DPB110601 DPA10301-DPB11101 DPA10301-DPB11301 DPA10301-DPB11801 DPA10301-DPB12301 DPA10301-DPB13901 DPA10301-DPB14001 DPA10301-DPB14901 DPA10301-DPB15501 DPA10301-DPB16501 DPA10301-DPB17501 DPA10301-DPB18001 DPA10401-DPB10101 DPA10401-DPB10201 DPA10401-DPB10202 DPA10401-DPB10402 DPA10401-DPB10501 DPA10401-DPB110501 DPA10401-DPB14901
KEPPFLWIGAELIPDKWTVQ

SEQ ID NO: 7052 - protein, 20 aa, synthetic construct
  source 1..20: note = Seed: KEPPFLWMGYELHPDKWTVQ; note = HLAs: DRB1_0101 DRB1_0405 DRB1_1001 DPA10103-DPB10201 DPA10103-DPB10202 DPA10103-DPB10401 DPA10103-DPB112601 DPA10103-DPB11501 DPA10103-DPB11601 DPA10103-DPB11801 DPA10103-DPB11901 DPA10103-DPB12301 DPA10103-DPB13401 DPA10103-DPB13901 DPA10103-DPB14001 DPA10103-DPB14101 DPA10103-DPB14801 DPA10103-DPB15501 DPA10103-DPB15901 DPA10104-DPB11501 DPA10105-DPB10401 DPA10105-DPB11801 DPA10201-DPB10201 DPA10201-DPB10202 DPA10201-DPB10401 DPA10201-DPB10501 DPA10201-DPB110601 DPA10201-DPB11501 DPA10201-DPB11601 DPA10201-DPB11901 DPA10201-DPB13401 DPA10201-DPB15501 DPA10202-DPB10201 DPA10202-DPB10202 DPA10202-DPB10401 DPA10202-DPB10501 DPA10202-DPB110601 DPA10202-DPB11301 DPA10202-DPB11801 DPA10202-DPB11901 DPA10202-DPB13801 DPA10202-DPB15501 DPA10301-DPB10201 DPA10301-DPB10202 DPA10301-DPB110601 DPA10301-DPB11301 DPA10301-DPB11801 DPA10301-DPB14001 DPA10301-DPB15501 DPA10401-DPB10201 DPA10401-DPB10202 DPA10401-DPB10402 DPA10401-DPB110501 DPA10401-DPB14901
KEPPFLWWGIELLPDKWTVQ

SEQ ID NO: 7053 - protein, 20 aa, synthetic construct
  source 1..20: note = Seed: KEPPFLWMGYELHPDKWTVQ; note = HLAs: DRB1_0101 DPA10103-DPB10101 DPA10103-DPB10201 DPA10103-DPB10202 DPA10103-DPB10401 DPA10103-DPB10402 DPA10103-DPB10501 DPA10103-DPB110501 DPA10103-DPB112601 DPA10103-DPB11501 DPA10103-DPB11601 DPA10103-DPB11801 DPA10103-DPB11901 DPA10103-DPB12301 DPA10103-DPB13101 DPA10103-DPB13401 DPA10103-DPB13901 DPA10103-DPB14001 DPA10103-DPB14101 DPA10103-DPB14801 DPA10103-DPB14901 DPA10103-DPB15001 DPA10103-DPB15101 DPA10103-DPB15501 DPA10103-DPB15901 DPA10103-DPB18001 DPA10104-DPB10101 DPA10104-DPB11501 DPA10105-DPB10101 DPA10105-DPB10401 DPA10105-DPB11801 DPA10105-DPB15001 DPA10106-DPB10101 DPA10201-DPB10101 DPA10201-DPB10201 DPA10201-DPB10202 DPA10201-DPB10401 DPA10201-DPB10501 DPA10201-DPB110601 DPA10201-DPB11501 DPA10201-DPB11601 DPA10201-DPB11901 DPA10201-DPB13401 DPA10201-DPB15501 DPA10202-DPB10101 DPA10202-DPB10201 DPA10202-DPB10202 DPA10202-DPB10401 DPA10202-DPB10501 DPA10202-DPB110601 DPA10202-DPB11101 DPA10202-DPB11301 DPA10202-DPB11801 DPA10202-DPB11901 DPA10202-DPB13101; note = HLAs: DPA10202-DPB13801 DPA10202-DPB15501 DPA10202-DPB16501 DPA10301-DPB10101 DPA10301-DPB10201 DPA10301-DPB10202 DPA10301-DPB10401 DPA10301-DPB10402 DPA10301-DPB110501 DPA10301-DPB110601 DPA10301-DPB11101 DPA10301-DPB11301 DPA10301-DPB11801 DPA10301-DPB12301 DPA10301-DPB13901 DPA10301-DPB14001 DPA10301-DPB14901 DPA10301-DPB15501 DPA10301-DPB16501 DPA10301-DPB17501 DPA10301-DPB18001 DPA10401-DPB10101 DPA10401-DPB10201 DPA10401-DPB10202 DPA10401-DPB10402 DPA10401-DPB10501 DPA10401-DPB110501 DPA10401-DPB14901
KEPPWLWMGFELLPDKWTVQ

SEQ ID NO: 7054 - protein, 20 aa, synthetic construct
  source 1..20: note = Seed: KEPPFLWMGYELHPDKWTVQ; note = HLAs: DPA10103-DPB10101 DPA10103-DPB10201 DPA10103-DPB10202 DPA10103-DPB10401 DPA10103-DPB10402 DPA10103-DPB10501 DPA10103-DPB110501 DPA10103-DPB112601 DPA10103-DPB11501 DPA10103-DPB11601 DPA10103-DPB11801 DPA10103-DPB11901 DPA10103-DPB12301 DPA10103-DPB13101 DPA10103-DPB13401 DPA10103-DPB13901 DPA10103-DPB14001 DPA10103-DPB14101 DPA10103-DPB14801 DPA10103-DPB14901 DPA10103-DPB15001 DPA10103-DPB15101 DPA10103-DPB15501 DPA10103-DPB15901 DPA10103-DPB18001 DPA10104-DPB10101 DPA10104-DPB11501 DPA10105-DPB10101 DPA10105-DPB10401 DPA10105-DPB11801 DPA10105-DPB15001 DPA10106-DPB10101 DPA10201-DPB10101 DPA10201-DPB10201 DPA10201-DPB10202 DPA10201-DPB10401 DPA10201-DPB10501 DPA10201-DPB110601 DPA10201-DPB11501 DPA10201-DPB11601 DPA10201-DPB11901 DPA10201-DPB13401 DPA10201-DPB15501 DPA10202-DPB10201 DPA10202-DPB10202 DPA10202-DPB10401 DPA10202-DPB10501 DPA10202-DPB110601 DPA10202-DPB11301 DPA10202-DPB11801 DPA10202-DPB11901 DPA10202-DPB13101 DPA10202-DPB13801 DPA10202-DPB15501 DPA10301-DPB10101; note = HLAs: DPA10301-DPB10201 DPA10301-DPB10202 DPA10301-DPB10401 DPA10301-DPB10402 DPA10301-DPB110501 DPA10301-DPB110601 DPA10301-DPB11301 DPA10301-DPB11801 DPA10301-DPB12301 DPA10301-DPB13901 DPA10301-DPB14001 DPA10301-DPB14901 DPA10301-DPB15501 DPA10301-DPB16501 DPA10301-DPB17501 DPA10301-DPB18001 DPA10401-DPB10201 DPA10401-DPB10202 DPA10401-DPB10402 DPA10401-DPB10501 DPA10401-DPB110501 DPA10401-DPB14901
KEPPLLWWGFELLPDKWTVQ

SEQ ID NO: 7055 - protein, 20 aa, synthetic construct
  source 1..20: note = Seed: KEPPFLWMGYELHPDKWTVQ; note = HLAs: DPA10103-DPB10101 DPA10103-DPB10201 DPA10103-DPB10202 DPA10103-DPB10401 DPA10103-DPB10402 DPA10103-DPB10501 DPA10103-DPB110501 DPA10103-DPB112601 DPA10103-DPB11501 DPA10103-DPB11601 DPA10103-DPB11801 DPA10103-DPB11901 DPA10103-DPB12301 DPA10103-DPB13101 DPA10103-DPB13401 DPA10103-DPB13901 DPA10103-DPB14001 DPA10103-DPB14101 DPA10103-DPB14801 DPA10103-DPB14901 DPA10103-DPB15001 DPA10103-DPB15101 DPA10103-DPB15501 DPA10103-DPB15901 DPA10103-DPB18001 DPA10104-DPB10101 DPA10104-DPB11501 DPA10105-DPB10101 DPA10105-DPB10401 DPA10105-DPB11801 DPA10105-DPB15001 DPA10106-DPB10101 DPA10201-DPB10101 DPA10201-DPB10201 DPA10201-DPB10202 DPA10201-DPB10401 DPA10201-DPB10501 DPA10201-DPB110601 DPA10201-DPB11501 DPA10201-DPB11601 DPA10201-DPB11901 DPA10201-DPB13401 DPA10201-DPB15501 DPA10202-DPB10101 DPA10202-DPB10201 DPA10202-DPB10202 DPA10202-DPB10401 DPA10202-DPB10501 DPA10202-DPB110601 DPA10202-DPB11101 DPA10202-DPB11301 DPA10202-DPB11801 DPA10202-DPB11901 DPA10202-DPB13101 DPA10202-DPB13801; note = HLAs: DPA10202-DPB15501 DPA10202-DPB16501 DPA10301-DPB10101 DPA10301-DPB10201 DPA10301-DPB10202 DPA10301-DPB10401 DPA10301-DPB10402 DPA10301-DPB110501 DPA10301-DPB110601 DPA10301-DPB11101 DPA10301-DPB11301 DPA10301-DPB11801 DPA10301-DPB12301 DPA10301-DPB13901 DPA10301-DPB14001 DPA10301-DPB14901 DPA10301-DPB15501 DPA10301-DPB16501 DPA10301-DPB17501 DPA10301-DPB18001 DPA10401-DPB10101 DPA10401-DPB10201 DPA10401-DPB10202 DPA10401-DPB10402 DPA10401-DPB10501 DPA10401-DPB110501 DPA10401-DPB14901
KEPPILWTGFELEPDKWTVQ

SEQ ID NO: 7056 - protein, 20 aa, synthetic construct
  source 1..20: note = Seed: KEPPFLWMGYELHPDKWTVQ; note = HLAs: DPA10103-DPB10101 DPA10103-DPB10201 DPA10103-DPB10202 DPA10103-DPB10401 DPA10103-DPB10402 DPA10103-DPB10501 DPA10103-DPB110501 DPA10103-DPB112601 DPA10103-DPB11501 DPA10103-DPB11601 DPA10103-DPB11801 DPA10103-DPB11901 DPA10103-DPB12301 DPA10103-DPB13101 DPA10103-DPB13401 DPA10103-DPB13901 DPA10103-DPB14001 DPA10103-DPB14101 DPA10103-DPB14801 DPA10103-DPB14901 DPA10103-DPB15001 DPA10103-DPB15101 DPA10103-DPB15501 DPA10103-DPB15901 DPA10103-DPB18001 DPA10104-DPB10101 DPA10104-DPB11501 DPA10105-DPB10101 DPA10105-DPB10401 DPA10105-DPB11801 DPA10105-DPB15001 DPA10106-DPB10101 DPA10201-DPB10101 DPA10201-DPB10201 DPA10201-DPB10202 DPA10201-DPB10401 DPA10201-DPB10501 DPA10201-DPB110601 DPA10201-DPB11501 DPA10201-DPB11601 DPA10201-DPB11901 DPA10201-DPB13401 DPA10201-DPB15501 DPA10202-DPB10101 DPA10202-DPB10201 DPA10202-DPB10202 DPA10202-DPB10401 DPA10202-DPB10501 DPA10202-DPB110601 DPA10202-DPB11101 DPA10202-DPB11301 DPA10202-DPB11801 DPA10202-DPB11901 DPA10202-DPB13101 DPA10202-DPB13801; note = HLAs: DPA10202-DPB15501 DPA10202-DPB16501 DPA10301-DPB10101 DPA10301-DPB10201 DPA10301-DPB10202 DPA10301-DPB10401 DPA10301-DPB10402 DPA10301-DPB110501 DPA10301-DPB110601 DPA10301-DPB11101 DPA10301-DPB11301 DPA10301-DPB11801 DPA10301-DPB12301 DPA10301-DPB13901 DPA10301-DPB14001 DPA10301-DPB14901 DPA10301-DPB16501 DPA10301-DPB17501 DPA10301-DPB18001 DPA10401-DPB10101 DPA10401-DPB10201 DPA10401-DPB10202 DPA10401-DPB10402 DPA10401-DPB10501 DPA10401-DPB110501 DPA10401-DPB14901
KEPPILWMGFELLPDKWTVQ

SEQ ID NO: 7057 - protein, 14 aa, synthetic construct
  source 1..14: note = Seed: PPFLWMGYELHPDK; note = HLAs: DPA10103-DPB10201 DPA10103-DPB10202 DPA10103-DPB10401 DPA10103-DPB112601 DPA10103-DPB11501 DPA10103-DPB11601 DPA10103-DPB11901 DPA10103-DPB12301 DPA10103-DPB13401 DPA10103-DPB13901 DPA10103-DPB14001 DPA10103-DPB14101 DPA10103-DPB14801 DPA10103-DPB15901 DPA10104-DPB11501 DPA10105-DPB10401 DPA10201-DPB110601 DPA10201-DPB11501 DPA10201-DPB11601 DPA10201-DPB11901 DPA10202-DPB10201 DPA10202-DPB10202 DPA10202-DPB110601 DPA10202-DPB11901 DPA10202-DPB13101 DPA10301-DPB10201 DPA10301-DPB10202 DPA10301-DPB10402 DPA10301-DPB110501 DPA10301-DPB110601 DPA10301-DPB11801 DPA10301-DPB14001 DPA10301-DPB14901 DPA10301-DPB17501 DPA10301-DPB18001 DPA10401-DPB10201 DPA10401-DPB10202 DPA10401-DPB10402 DPA10401-DPB110501 DPA10401-DPB14901
PPMLWWGFELLPDK

SEQ ID NO: 7058 - protein, 20 aa, synthetic construct
  source 1..20: note = Seed: KEPPFLWMGYELHPDKWTVQ; note = HLAs: DRB1_0101 DRB1_0405 DRB1_1001 DPA10103-DPB10101 DPA10103-DPB10201 DPA10103-DPB10202 DPA10103-DPB10401 DPA10103-DPB10402 DPA10103-DPB10501 DPA10103-DPB110501 DPA10103-DPB112601 DPA10103-DPB11501 DPA10103-DPB11601 DPA10103-DPB11801 DPA10103-DPB11901 DPA10103-DPB12301 DPA10103-DPB13401 DPA10103-DPB13901 DPA10103-DPB14001 DPA10103-DPB14101 DPA10103-DPB14801 DPA10103-DPB14901 DPA10103-DPB15001 DPA10103-DPB15101 DPA10103-DPB15501 DPA10103-DPB15901 DPA10103-DPB18001 DPA10104-DPB10101 DPA10104-DPB11501 DPA10105-DPB10101 DPA10105-DPB10401 DPA10105-DPB11801 DPA10105-DPB15001 DPA10106-DPB10101 DPA10201-DPB10101 DPA10201-DPB10201 DPA10201-DPB10202 DPA10201-DPB10401 DPA10201-DPB10501 DPA10201-DPB110601 DPA10201-DPB11501 DPA10201-DPB11601 DPA10201-DPB11901 DPA10201-DPB13401 DPA10201-DPB15501 DPA10202-DPB10101 DPA10202-DPB10201 DPA10202-DPB10202 DPA10202-DPB10501 DPA10202-DPB110601 DPA10202-DPB11101 DPA10202-DPB11301 DPA10202-DPB11801 DPA10202-DPB11901 DPA10202-DPB13101 DPA10202-DPB13801; note = HLAs: DPA10202-DPB15501 DPA10202-DPB16501 DPA10301-DPB10101 DPA10301-DPB10201 DPA10301-DPB10202 DPA10301-DPB10401 DPA10301-DPB10402 DPA10301-DPB110501 DPA10301-DPB110601 DPA10301-DPB11101 DPA10301-DPB11301 DPA10301-DPB11801 DPA10301-DPB12301 DPA10301-DPB13901 DPA10301-DPB14001 DPA10301-DPB14901 DPA10301-DPB15501 DPA10301-DPB16501 DPA10301-DPB17501 DPA10301-DPB18001 DPA10401-DPB10101 DPA10401-DPB10201 DPA10401-DPB10202 DPA10401-DPB10402 DPA10401-DPB10501 DPA10401-DPB110501 DPA10401-DPB14901
KEPPFLWAGVELLPDKWTVQ

SEQ ID NO: 7059 - protein, 20 aa, synthetic construct
  source 1..20: note = Seed: KEPPFLWMGYELHPDKWTVQ; note = HLAs: DRB1_0101 DRB1_0405 DRB1_1001 DPA10103-DPB10101 DPA10103-DPB10201 DPA10103-DPB10202 DPA10103-DPB10401 DPA10103-DPB10402 DPA10103-DPB10501 DPA10103-DPB110501 DPA10103-DPB112601 DPA10103-DPB11501 DPA10103-DPB11601 DPA10103-DPB11801 DPA10103-DPB11901 DPA10103-DPB12301 DPA10103-DPB13101 DPA10103-DPB13401 DPA10103-DPB13901 DPA10103-DPB14001 DPA10103-DPB14101 DPA10103-DPB14801 DPA10103-DPB14901 DPA10103-DPB15001 DPA10103-DPB15101 DPA10103-DPB15501 DPA10103-DPB15901 DPA10103-DPB18001 DPA10104-DPB10101 DPA10104-DPB11501 DPA10105-DPB10101 DPA10105-DPB10401 DPA10105-DPB11801 DPA10105-DPB15001 DPA10106-DPB10101 DPA10201-DPB10101 DPA10201-DPB10201 DPA10201-DPB10202 DPA10201-DPB10401 DPA10201-DPB10501 DPA10201-DPB110601 DPA10201-DPB11501 DPA10201-DPB11601 DPA10201-DPB11901 DPA10201-DPB13401 DPA10201-DPB15501 DPA10202-DPB10101 DPA10202-DPB10201 DPA10202-DPB10202 DPA10202-DPB10401 DPA10202-DPB10501 DPA10202-DPB110601 DPA10202-DPB11101 DPA10202-DPB11301 DPA10202-DPB11801 DPA10202-DPB11901; note = HLAs: DPA10202-DPB13101 DPA10202-DPB13801 DPA10202-DPB15501 DPA10202-DPB16501 DPA10301-DPB10101 DPA10301-DPB10201 DPA10301-DPB10202 DPA10301-DPB10401 DPA10301-DPB10402 DPA10301-DPB110501 DPA10301-DPB110601 DPA10301-DPB11101 DPA10301-DPB11301 DPA10301-DPB11801 DPA10301-DPB12301 DPA10301-DPB13901 DPA10301-DPB14001 DPA10301-DPB14901 DPA10301-DPB15501 DPA10301-DPB16501 DPA10301-DPB17501 DPA10301-DPB18001 DPA10401-DPB10101 DPA10401-DPB10201 DPA10401-DPB10202 DPA10401-DPB10402 DPA10401-DPB10501 DPA10401-DPB110501 DPA10401-DPB14901
KEPPFLWTGLELSPDKWTVQ

SEQ ID NO: 7060 - protein, 20 aa, synthetic construct
  source 1..20: note = Seed: KEPPFLWMGYELHPDKWTVQ; note = HLAs: DPA10103-DPB10101 DPA10103-DPB10201 DPA10103-DPB10202 DPA10103-DPB10401 DPA10103-DPB10402 DPA10103-DPB10501 DPA10103-DPB110501 DPA10103-DPB112601 DPA10103-DPB11501 DPA10103-DPB11601 DPA10103-DPB11801 DPA10103-DPB11901 DPA10103-DPB12301 DPA10103-DPB13101 DPA10103-DPB13401 DPA10103-DPB13901 DPA10103-DPB14001 DPA10103-DPB14101 DPA10103-DPB14801 DPA10103-DPB14901 DPA10103-DPB15001 DPA10103-DPB15101 DPA10103-DPB15501 DPA10103-DPB15901 DPA10103-DPB18001 DPA10104-DPB10101 DPA10104-DPB11501 DPA10105-DPB10101 DPA10105-DPB10401 DPA10105-DPB11801 DPA10105-DPB15001 DPA10106-DPB10101 DPA10201-DPB10101 DPA10201-DPB10201 DPA10201-DPB10202 DPA10201-DPB10401 DPA10201-DPB10501 DPA10201-DPB110601 DPA10201-DPB11501 DPA10201-DPB11601 DPA10201-DPB11901 DPA10201-DPB13401 DPA10201-DPB15501 DPA10202-DPB10101 DPA10202-DPB10201 DPA10202-DPB10202 DPA10202-DPB10401 DPA10202-DPB10501 DPA10202-DPB110601 DPA10202-DPB11101 DPA10202-DPB11301 DPA10202-DPB11801 DPA10202-DPB11901 DPA10202-DPB13101 DPA10202-DPB13801; note = HLAs: DPA10202-DPB15501 DPA10202-DPB16501 DPA10301-DPB10101 DPA10301-DPB10201 DPA10301-DPB10202 DPA10301-DPB10401 DPA10301-DPB10402 DPA10301-DPB110501 DPA10301-DPB110601 DPA10301-DPB11101 DPA10301-DPB11301 DPA10301-DPB11801 DPA10301-DPB12301 DPA10301-DPB13901 DPA10301-DPB14001 DPA10301-DPB14901 DPA10301-DPB15501 DPA10301-DPB16501 DPA10301-DPB17501 DPA10301-DPB18001 DPA10401-DPB10101 DPA10401-DPB10201 DPA10401-DPB10202 DPA10401-DPB10402 DPA10401-DPB10501 DPA10401-DPB110501 DPA10401-DPB14901
KEPPLLWSGFELEPDKWTVQ

SEQ ID NO: 7061 - protein, 20 aa, synthetic construct
  source 1..20: note = Seed: KEPPFLWMGYELHPDKWTVQ; note = HLAs: DRB1_0101 DRB1_1001 DPA10103-DPB10101 DPA10103-DPB10201 DPA10103-DPB10202 DPA10103-DPB10401 DPA10103-DPB10402 DPA10103-DPB10501 DPA10103-DPB110501 DPA10103-DPB112601 DPA10103-DPB11501 DPA10103-DPB11601 DPA10103-DPB11801 DPA10103-DPB11901 DPA10103-DPB12301 DPA10103-DPB13101 DPA10103-DPB13401 DPA10103-DPB13901 DPA10103-DPB14001 DPA10103-DPB14101 DPA10103-DPB14801 DPA10103-DPB14901 DPA10103-DPB15001 DPA10103-DPB15101 DPA10103-DPB15501 DPA10103-DPB15901 DPA10103-DPB18001 DPA10104-DPB10101 DPA10104-DPB11501 DPA10105-DPB10101 DPA10105-DPB10401 DPA10105-DPB11801 DPA10105-DPB15001 DPA10106-DPB10101 DPA10201-DPB10101 DPA10201-DPB10201 DPA10201-DPB10202 DPA10201-DPB10401 DPA10201-DPB10501 DPA10201-DPB110601 DPA10201-DPB11501 DPA10201-DPB11601 DPA10201-DPB11901 DPA10201-DPB13401 DPA10201-DPB15501 DPA10202-DPB10101 DPA10202-DPB10201 DPA10202-DPB10202 DPA10202-DPB10401 DPA10202-DPB10501 DPA10202-DPB110601 DPA10202-DPB11301 DPA10202-DPB11801 DPA10202-DPB11901 DPA10202-DPB13101; note = HLAs: DPA10202-DPB13801 DPA10202-DPB15501 DPA10202-DPB16501 DPA10301-DPB10101 DPA10301-DPB10201 DPA10301-DPB10202 DPA10301-DPB10401 DPA10301-DPB10402 DPA10301-DPB110501 DPA10301-DPB110601 DPA10301-DPB11301 DPA10301-DPB11801 DPA10301-DPB12301 DPA10301-DPB13901 DPA10301-DPB14001 DPA10301-DPB14901 DPA10301-DPB15501 DPA10301-DPB16501 DPA10301-DPB17501 DPA10301-DPB18001 DPA10401-DPB10101 DPA10401-DPB10201 DPA10401-DPB10202 DPA10401-DPB10402 DPA10401-DPB10501 DPA10401-DPB110501 DPA10401-DPB14901
KEPPFLWQGMELLPDKWTVQ

SEQ ID NO: 7062 - protein, 14 aa, synthetic construct
  source 1..14: note = Seed: PPFLWMGYELHPDK; note = HLAs: DPA10103-DPB10101 DPA10103-DPB10201 DPA10103-DPB10202 DPA10103-DPB10401 DPA10103-DPB112601 DPA10103-DPB11501 DPA10103-DPB11601 DPA10103-DPB11901 DPA10103-DPB12301 DPA10103-DPB13101 DPA10103-DPB13401 DPA10103-DPB13901 DPA10103-DPB14001 DPA10103-DPB14101 DPA10103-DPB14801 DPA10103-DPB15001 DPA10103-DPB15901 DPA10104-DPB10101 DPA10104-DPB11501 DPA10105-DPB10101 DPA10105-DPB10401 DPA10105-DPB15001 DPA10106-DPB10101 DPA10201-DPB10101 DPA10201-DPB110601 DPA10201-DPB11501 DPA10201-DPB11601 DPA10201-DPB11901 DPA10202-DPB10101 DPA10202-DPB10201 DPA10202-DPB10202 DPA10202-DPB10401 DPA10202-DPB110601 DPA10202-DPB11901 DPA10202-DPB13101 DPA10202-DPB16501 DPA10301-DPB10101 DPA10301-DPB10201 DPA10301-DPB10202 DPA10301-DPB10401 DPA10301-DPB10402 DPA10301-DPB110501 DPA10301-DPB110601 DPA10301-DPB11801 DPA10301-DPB12301 DPA10301-DPB13901 DPA10301-DPB14001 DPA10301-DPB14901 DPA10301-DPB15501 DPA10301-DPB16501 DPA10301-DPB17501 DPA10301-DPB18001 DPA10401-DPB10101 DPA10401-DPB10201; note = HLAs: DPA10401-DPB10202 DPA10401-DPB10402 DPA10401-DPB10501 DPA10401-DPB110501 DPA10401-DPB14901
PPYLWTGLELIPDK

SEQ ID NO: 7063 - protein, 14 aa, synthetic construct
  source 1..14: note = Seed: PPFLWMGYELHPDK; note = HLAs: DPA10103-DPB10101 DPA10103-DPB10201 DPA10103-DPB10202 DPA10103-DPB10401 DPA10103-DPB112601 DPA10103-DPB11501 DPA10103-DPB11601 DPA10103-DPB11901 DPA10103-DPB12301 DPA10103-DPB13101 DPA10103-DPB13401 DPA10103-DPB13901 DPA10103-DPB14001 DPA10103-DPB14101 DPA10103-DPB14801 DPA10103-DPB15001 DPA10103-DPB15901 DPA10104-DPB10101 DPA10104-DPB11501 DPA10105-DPB10101 DPA10105-DPB10401 DPA10105-DPB15001 DPA10106-DPB10101 DPA10201-DPB10101 DPA10201-DPB110601 DPA10201-DPB11501 DPA10201-DPB11601 DPA10201-DPB11901 DPA10202-DPB10101 DPA10202-DPB10201 DPA10202-DPB10202 DPA10202-DPB10401 DPA10202-DPB110601 DPA10202-DPB11901 DPA10202-DPB13101 DPA10202-DPB16501 DPA10301-DPB10101 DPA10301-DPB10201 DPA10301-DPB10202 DPA10301-DPB10401 DPA10301-DPB10402 DPA10301-DPB110501 DPA10301-DPB110601 DPA10301-DPB11801 DPA10301-DPB12301 DPA10301-DPB13901 DPA10301-DPB14001 DPA10301-DPB14901 DPA10301-DPB15501 DPA10301-DPB16501 DPA10301-DPB17501 DPA10301-DPB18001 DPA10401-DPB10101 DPA10401-DPB10201; note = HLAs: DPA10401-DPB10202 DPA10401-DPB10402 DPA10401-DPB10501 DPA10401-DPB110501 DPA10401-DPB14901
PPILWVGFELNPDK

SEQ ID NO: 7064 - protein, 14 aa, synthetic construct
  source 1..14: note = Seed: PPFLWMGYELHPDK; note = HLAs: DPA10103-DPB10101 DPA10103-DPB10201 DPA10103-DPB10202 DPA10103-DPB10401 DPA10103-DPB112601 DPA10103-DPB11501 DPA10103-DPB11601 DPA10103-DPB11901 DPA10103-DPB12301 DPA10103-DPB13101 DPA10103-DPB13401 DPA10103-DPB13901 DPA10103-DPB14001 DPA10103-DPB14101 DPA10103-DPB14801 DPA10103-DPB15001 DPA10103-DPB15901 DPA10104-DPB10101 DPA10104-DPB11501 DPA10105-DPB10101 DPA10105-DPB10401 DPA10105-DPB15001 DPA10106-DPB10101 DPA10201-DPB10101 DPA10201-DPB110601 DPA10201-DPB11501 DPA10201-DPB11601 DPA10201-DPB11901 DPA10202-DPB10101 DPA10202-DPB10201 DPA10202-DPB10202 DPA10202-DPB10401 DPA10202-DPB110601 DPA10202-DPB11901 DPA10202-DPB13101 DPA10202-DPB16501 DPA10301-DPB10101 DPA10301-DPB10201 DPA10301-DPB10202 DPA10301-DPB10401 DPA10301-DPB10402 DPA10301-DPB110501 DPA10301-DPB110601 DPA10301-DPB11801 DPA10301-DPB12301 DPA10301-DPB13901 DPA10301-DPB14001 DPA10301-DPB14901 DPA10301-DPB15501 DPA10301-DPB16501 DPA10301-DPB17501 DPA10301-DPB18001 DPA10401-DPB10101 DPA10401-DPB10201; note = HLAs: DPA10401-DPB10202 DPA10401-DPB10402 DPA10401-DPB10501 DPA10401-DPB110501 DPA10401-DPB14901
PPFLWCGYELLPDK

SEQ ID NO: 7065 - protein, 20 aa, synthetic construct
  source 1..20: note = Seed: KEPPFLWMGYELHPDKWTVQ; note = HLAs: DPA10103-DPB10101 DPA10103-DPB10201 DPA10103-DPB10202 DPA10103-DPB10401 DPA10103-DPB10402 DPA10103-DPB10501 DPA10103-DPB110501 DPA10103-DPB112601 DPA10103-DPB11501 DPA10103-DPB11601 DPA10103-DPB11801 DPA10103-DPB11901 DPA10103-DPB12301 DPA10103-DPB13101 DPA10103-DPB13401 DPA10103-DPB13901 DPA10103-DPB14001 DPA10103-DPB14101 DPA10103-DPB14801 DPA10103-DPB14901 DPA10103-DPB15001 DPA10103-DPB15101 DPA10103-DPB15501 DPA10103-DPB15901 DPA10103-DPB18001 DPA10104-DPB10101 DPA10104-DPB11501 DPA10105-DPB10101 DPA10105-DPB10401 DPA10105-DPB11801 DPA10105-DPB15001 DPA10106-DPB10101 DPA10201-DPB10101 DPA10201-DPB10201 DPA10201-DPB10202 DPA10201-DPB10401 DPA10201-DPB10501 DPA10201-DPB110601 DPA10201-DPB11501 DPA10201-DPB11601 DPA10201-DPB11901 DPA10201-DPB13401 DPA10201-DPB15501 DPA10202-DPB10101 DPA10202-DPB10201 DPA10202-DPB10202 DPA10202-DPB10401 DPA10202-DPB10501 DPA10202-DPB110601 DPA10202-DPB11101 DPA10202-DPB11301 DPA10202-DPB11801 DPA10202-DPB11901 DPA10202-DPB13101 DPA10202-DPB13801; note = HLAs: DPA10202-DPB15501 DPA10202-DPB16501 DPA10301-DPB10101 DPA10301-DPB10201 DPA10301-DPB10202 DPA10301-DPB10401 DPA10301-DPB10402 DPA10301-DPB110501 DPA10301-DPB110601 DPA10301-DPB11101 DPA10301-DPB11301 DPA10301-DPB11801 DPA10301-DPB12301 DPA10301-DPB13901 DPA10301-DPB14001 DPA10301-DPB14901 DPA10301-DPB15501 DPA10301-DPB16501 DPA10301-DPB17501 DPA10301-DPB18001 DPA10401-DPB10101 DPA10401-DPB10201 DPA10401-DPB10202 DPA10401-DPB10402 DPA10401-DPB10501 DPA10401-DPB110501 DPA10401-DPB14901
KEPPYLWHGFELSPDKWTVQ

SEQ ID NO: 7066 - protein, 14 aa, synthetic construct
  source 1..14: note = Seed: PPFLWMGYELHPDK; note = HLAs: DRB1_1001 DPA10103-DPB10101 DPA10103-DPB10201 DPA10103-DPB10202 DPA10103-DPB10401 DPA10103-DPB112601 DPA10103-DPB11501 DPA10103-DPB11601 DPA10103-DPB11901 DPA10103-DPB12301 DPA10103-DPB13101 DPA10103-DPB13401 DPA10103-DPB13901 DPA10103-DPB14001 DPA10103-DPB14101 DPA10103-DPB14801 DPA10103-DPB15001 DPA10103-DPB15901 DPA10104-DPB10101 DPA10104-DPB11501 DPA10105-DPB10101 DPA10105-DPB10401 DPA10105-DPB15001 DPA10106-DPB10101 DPA10201-DPB10101 DPA10201-DPB110601 DPA10201-DPB11501 DPA10201-DPB11601 DPA10201-DPB11901 DPA10202-DPB10101 DPA10202-DPB10201 DPA10202-DPB10202 DPA10202-DPB10401 DPA10202-DPB110601 DPA10202-DPB11901 DPA10202-DPB13101 DPA10202-DPB16501 DPA10301-DPB10101 DPA10301-DPB10201 DPA10301-DPB10202 DPA10301-DPB10401 DPA10301-DPB10402 DPA10301-DPB110501 DPA10301-DPB110601 DPA10301-DPB11801 DPA10301-DPB12301 DPA10301-DPB13901 DPA10301-DPB14001 DPA10301-DPB14901 DPA10301-DPB15501 DPA10301-DPB16501 DPA10301-DPB17501 DPA10301-DPB18001 DPA10401-DPB10101 DPA10401-DPB10201; note = HLAs: DPA10401-DPB10202 DPA10401-DPB10402 DPA10401-DPB10501 DPA10401-DPB110501 DPA10401-DPB14901
PPFLWCGFELAPDK

SEQ ID NO: 7067 - protein, 14 aa, synthetic construct
  source 1..14: note = Seed: PPFLWMGYELHPDK; note = HLAs: DRB1_1001 DPA10103-DPB10201 DPA10103-DPB10202 DPA10103-DPB10401 DPA10103-DPB112601 DPA10103-DPB11501 DPA10103-DPB11601 DPA10103-DPB12301 DPA10103-DPB13401 DPA10103-DPB13901 DPA10103-DPB14001 DPA10103-DPB14101 DPA10103-DPB14801 DPA10103-DPB15901 DPA10104-DPB11501 DPA10105-DPB10401 DPA10106-DPB10101 DPA10201-DPB10101 DPA10201-DPB110601 DPA10201-DPB11501 DPA10201-DPB11601 DPA10201-DPB11901 DPA10202-DPB10101 DPA10202-DPB10201 DPA10202-DPB10202 DPA10202-DPB10401 DPA10202-DPB110601 DPA10202-DPB11901 DPA10202-DPB13101 DPA10202-DPB16501 DPA10301-DPB10201 DPA10301-DPB10202 DPA10301-DPB10401 DPA10301-DPB10402 DPA10301-DPB110501 DPA10301-DPB110601 DPA10301-DPB11801 DPA10301-DPB12301 DPA10301-DPB13901 DPA10301-DPB14001 DPA10301-DPB14901 DPA10301-DPB15501 DPA10301-DPB17501 DPA10301-DPB18001 DPA10401-DPB10201 DPA10401-DPB10202 DPA10401-DPB10402 DPA10401-DPB10501 DPA10401-DPB110501 DPA10401-DPB14901
PPFLWMGVELLPDK

SEQ ID NO: 7068 - protein, 20 aa, synthetic construct
  source 1..20: note = Seed: KEPPFLWMGYELHPDKWTVQ; note = HLAs: DRB1_0101 DRB1_1001 DPA10103-DPB10101 DPA10103-DPB10201 DPA10103-DPB10202 DPA10103-DPB10401 DPA10103-DPB10402 DPA10103-DPB10501 DPA10103-DPB110501 DPA10103-DPB112601 DPA10103-DPB11501 DPA10103-DPB11601 DPA10103-DPB11801 DPA10103-DPB11901 DPA10103-DPB12301 DPA10103-DPB13101 DPA10103-DPB13401 DPA10103-DPB13901 DPA10103-DPB14001 DPA10103-DPB14101 DPA10103-DPB14801 DPA10103-DPB14901 DPA10103-DPB15001 DPA10103-DPB15101 DPA10103-DPB15501 DPA10103-DPB15901 DPA10103-DPB18001 DPA10104-DPB10101 DPA10104-DPB11501 DPA10105-DPB10101 DPA10105-DPB10401 DPA10105-DPB11801 DPA10105-DPB15001 DPA10106-DPB10101 DPA10201-DPB10101 DPA10201-DPB10201 DPA10201-DPB10202 DPA10201-DPB10401 DPA10201-DPB10501 DPA10201-DPB110601 DPA10201-DPB11501 DPA10201-DPB11601 DPA10201-DPB11901 DPA10201-DPB13401 DPA10201-DPB15501 DPA10202-DPB10101 DPA10202-DPB10201 DPA10202-DPB10202 DPA10202-DPB10401 DPA10202-DPB10501 DPA10202-DPB110601 DPA10202-DPB11101 DPA10202-DPB11301 DPA10202-DPB11801 DPA10202-DPB11901; note = HLAs: DPA10202-DPB13101 DPA10202-DPB13801 DPA10202-DPB15501 DPA10202-DPB16501 DPA10301-DPB10101 DPA10301-DPB10201 DPA10301-DPB10202 DPA10301-DPB10401 DPA10301-DPB10402 DPA10301-DPB110501 DPA10301-DPB110601 DPA10301-DPB11101 DPA10301-DPB11301 DPA10301-DPB11801 DPA10301-DPB12301 DPA10301-DPB13901 DPA10301-DPB14001 DPA10301-DPB14901 DPA10301-DPB15501 DPA10301-DPB16501 DPA10301-DPB17501 DPA10301-DPB18001 DPA10401-DPB10101 DPA10401-DPB10201 DPA10401-DPB10202 DPA10401-DPB10402 DPA10401-DPB10501 DPA10401-DPB110501 DPA10401-DPB14901
KEPPFLWIGIELIPDKWTVQ

SEQ ID NO: 7069 - protein, 20 aa, synthetic construct
  source 1..20: note = Seed: KEPPFLWMGYELHPDKWTVQ; note = HLAs: DPA10103-DPB10101 DPA10103-DPB10201 DPA10103-DPB10202 DPA10103-DPB10501 DPA10103-DPB11601 DPA10103-DPB11901 DPA10103-DPB13101 DPA10103-DPB13401 DPA10103-DPB14001 DPA10103-DPB14101 DPA10103-DPB14801 DPA10103-DPB15001 DPA10103-DPB15501 DPA10104-DPB10101 DPA10105-DPB10101 DPA10105-DPB15001 DPA10201-DPB10201 DPA10201-DPB10202 DPA10201-DPB10401 DPA10201-DPB10501 DPA10201-DPB110601 DPA10201-DPB11601 DPA10201-DPB11901 DPA10201-DPB13401 DPA10201-DPB15501 DPA10202-DPB10101 DPA10202-DPB10201 DPA10202-DPB10202 DPA10202-DPB10401 DPA10202-DPB10501 DPA10202-DPB110601 DPA10202-DPB11101 DPA10202-DPB11301 DPA10202-DPB11801 DPA10202-DPB11901 DPA10202-DPB13101 DPA10202-DPB13801 DPA10202-DPB15501 DPA10202-DPB16501 DPA10301-DPB10101 DPA10301-DPB110601 DPA10301-DPB11301 DPA10301-DPB15501 DPA10301-DPB16501 DPA10401-DPB10101 DPA10401-DPB10201 DPA10401-DPB10402 DPA10401-DPB10501 DPA10401-DPB110501 DPA10401-DPB14901
KEPPRLWVGFELLPDKWTVQ

SEQ ID NO: 7070 - protein, 14 aa, synthetic construct
  source 1..14: note = Seed: PPFLWMGYELHPDK; note = HLAs: DRB1_1001 DPA10103-DPB10101 DPA10103-DPB10201 DPA10103-DPB10202 DPA10103-DPB10401 DPA10103-DPB112601 DPA10103-DPB11501 DPA10103-DPB11601 DPA10103-DPB11901 DPA10103-DPB12301 DPA10103-DPB13101 DPA10103-DPB13401 DPA10103-DPB13901 DPA10103-DPB14001 DPA10103-DPB14101 DPA10103-DPB14801 DPA10103-DPB15001 DPA10103-DPB15901 DPA10104-DPB10101 DPA10104-DPB11501 DPA10105-DPB10101 DPA10105-DPB10401 DPA10105-DPB15001 DPA10106-DPB10101 DPA10201-DPB10101 DPA10201-DPB110601 DPA10201-DPB11501 DPA10201-DPB11601 DPA10201-DPB11901 DPA10202-DPB10101 DPA10202-DPB10201 DPA10202-DPB10202 DPA10202-DPB10401 DPA10202-DPB110601 DPA10202-DPB11901 DPA10202-DPB13101 DPA10202-DPB16501 DPA10301-DPB10101 DPA10301-DPB10201 DPA10301-DPB10202 DPA10301-DPB10401 DPA10301-DPB10402 DPA10301-DPB110501 DPA10301-DPB110601 DPA10301-DPB11801 DPA10301-DPB12301 DPA10301-DPB13901 DPA10301-DPB14001 DPA10301-DPB14901 DPA10301-DPB15501 DPA10301-DPB16501 DPA10301-DPB17501 DPA10301-DPB18001 DPA10401-DPB10101 DPA10401-DPB10201; note = HLAs: DPA10401-DPB10202 DPA10401-DPB10402 DPA10401-DPB10501 DPA10401-DPB110501 DPA10401-DPB14901
PPYLWIGFELEPDK

SEQ ID NO: 7071 - protein, 14 aa, synthetic construct
  source 1..14: note = Seed: PPFLWMGYELHPDK; note = HLAs: DPA10103-DPB10101 DPA10103-DPB10201 DPA10103-DPB10202 DPA10103-DPB10401 DPA10103-DPB112601 DPA10103-DPB11501 DPA10103-DPB11601 DPA10103-DPB11901 DPA10103-DPB12301 DPA10103-DPB13101 DPA10103-DPB13401 DPA10103-DPB13901 DPA10103-DPB14001 DPA10103-DPB14101 DPA10103-DPB14801 DPA10103-DPB15001 DPA10103-DPB15901 DPA10104-DPB10101 DPA10104-DPB11501 DPA10105-DPB10101 DPA10105-DPB10401 DPA10105-DPB15001 DPA10106-DPB10101 DPA10201-DPB10101 DPA10201-DPB110601 DPA10201-DPB11501 DPA10201-DPB11601 DPA10201-DPB11901 DPA10202-DPB10101 DPA10202-DPB10201 DPA10202-DPB10202 DPA10202-DPB10401 DPA10202-DPB110601 DPA10202-DPB11901 DPA10202-DPB13101 DPA10202-DPB16501 DPA10301-DPB10101 DPA10301-DPB10201 DPA10301-DPB10202 DPA10301-DPB10401 DPA10301-DPB10402 DPA10301-DPB110501 DPA10301-DPB110601 DPA10301-DPB11801 DPA10301-DPB12301 DPA10301-DPB13901 DPA10301-DPB14001 DPA10301-DPB14901 DPA10301-DPB15501 DPA10301-DPB16501 DPA10301-DPB17501 DPA10301-DPB18001 DPA10401-DPB10101 DPA10401-DPB10201; note = HLAs: DPA10401-DPB10202 DPA10401-DPB10402 DPA10401-DPB10501 DPA10401-DPB110501 DPA10401-DPB14901
PPLLWTGYELMPDK

SEQ ID NO: 7072 - protein, 20 aa, synthetic construct
  source 1..20: note = Seed: KEPPFLWMGYELHPDKWTVQ; note = HLAs: DRB1_0101 DPA10103-DPB10201 DPA10103-DPB10202 DPA10103-DPB10401 DPA10103-DPB10402 DPA10103-DPB10501 DPA10103-DPB110501 DPA10103-DPB112601 DPA10103-DPB11501 DPA10103-DPB11601 DPA10103-DPB11801 DPA10103-DPB11901 DPA10103-DPB12301 DPA10103-DPB13101 DPA10103-DPB13401 DPA10103-DPB13901 DPA10103-DPB14001 DPA10103-DPB14101 DPA10103-DPB14801 DPA10103-DPB14901 DPA10103-DPB15001 DPA10103-DPB15101 DPA10103-DPB15501 DPA10103-DPB15901 DPA10103-DPB18001 DPA10104-DPB11501 DPA10105-DPB10401 DPA10105-DPB11801 DPA10105-DPB15001 DPA10106-DPB10101 DPA10201-DPB10101 DPA10201-DPB10201 DPA10201-DPB10202 DPA10201-DPB10401 DPA10201-DPB10501 DPA10201-DPB110601 DPA10201-DPB11501 DPA10201-DPB11601 DPA10201-DPB11901 DPA10201-DPB13401 DPA10201-DPB15501 DPA10202-DPB10101 DPA10202-DPB10201 DPA10202-DPB10202 DPA10202-DPB10401 DPA10202-DPB10501 DPA10202-DPB110601 DPA10202-DPB11301 DPA10202-DPB11801 DPA10202-DPB11901 DPA10202-DPB13101 DPA10202-DPB13801 DPA10202-DPB15501 DPA10202-DPB16501 DPA10301-DPB10101; note = HLAs: DPA10301-DPB10201 DPA10301-DPB10202 DPA10301-DPB10401 DPA10301-DPB10402 DPA10301-DPB110501 DPA10301-DPB110601 DPA10301-DPB11301 DPA10301-DPB11801 DPA10301-DPB12301 DPA10301-DPB13901 DPA10301-DPB14001 DPA10301-DPB14901 DPA10301-DPB15501 DPA10301-DPB16501 DPA10301-DPB17501 DPA10301-DPB18001 DPA10401-DPB10101 DPA10401-DPB10201 DPA10401-DPB10202 DPA10401-DPB10402 DPA10401-DPB10501 DPA10401-DPB110501 DPA10401-DPB14901
KEPPYLWHGIELLPDKWTVQ

SEQ ID NO: 7073 - protein, 20 aa, synthetic construct
  source 1..20: note = Seed: KEPPFLWMGYELHPDKWTVQ; note = HLAs: DRB1_0101 DRB1_0405 DRB1_1001 DPA10103-DPB10101 DPA10103-DPB10201 DPA10103-DPB10202 DPA10103-DPB10401 DPA10103-DPB10402 DPA10103-DPB10501 DPA10103-DPB110501 DPA10103-DPB112601 DPA10103-DPB11501 DPA10103-DPB11601 DPA10103-DPB11801 DPA10103-DPB11901 DPA10103-DPB12301 DPA10103-DPB13101 DPA10103-DPB13401 DPA10103-DPB13901 DPA10103-DPB14001 DPA10103-DPB14101 DPA10103-DPB14801 DPA10103-DPB14901 DPA10103-DPB15001 DPA10103-DPB15101 DPA10103-DPB15501 DPA10103-DPB15901 DPA10103-DPB18001 DPA10104-DPB10101 DPA10104-DPB11501 DPA10105-DPB10101 DPA10105-DPB10401 DPA10105-DPB11801 DPA10105-DPB15001 DPA10106-DPB10101 DPA10201-DPB10101 DPA10201-DPB10201 DPA10201-DPB10202 DPA10201-DPB10401 DPA10201-DPB10501 DPA10201-DPB110601 DPA10201-DPB11501 DPA10201-DPB11601 DPA10201-DPB11901 DPA10201-DPB13401 DPA10201-DPB15501 DPA10202-DPB10101 DPA10202-DPB10201 DPA10202-DPB10202 DPA10202-DPB10401 DPA10202-DPB10501 DPA10202-DPB110601 DPA10202-DPB11101 DPA10202-DPB11301 DPA10202-DPB11801 DPA10202-DPB11901; note = HLAs: DPA10202-DPB13101 DPA10202-DPB13801 DPA10202-DPB15501 DPA10202-DPB16501 DPA10301-DPB10101 DPA10301-DPB10201 DPA10301-DPB10202 DPA10301-DPB10401 DPA10301-DPB10402 DPA10301-DPB110501 DPA10301-DPB110601 DPA10301-DPB11101 DPA10301-DPB11301 DPA10301-DPB11801 DPA10301-DPB12301 DPA10301-DPB13901 DPA10301-DPB14001 DPA10301-DPB14901 DPA10301-DPB15501 DPA10301-DPB16501 DPA10301-DPB17501 DPA10301-DPB18001 DPA10401-DPB10101 DPA10401-DPB10201 DPA10401-DPB10202 DPA10401-DPB10402 DPA10401-DPB10501 DPA10401-DPB110501 DPA10401-DPB14901
KEPPFLWSGAELLPDKWTVQ

SEQ ID NO: 7074 - protein, 14 aa, synthetic construct
  source 1..14: note = Seed: PPFLWMGYELHPDK; note = HLAs: DPA10103-DPB10101 DPA10103-DPB10201 DPA10103-DPB10202 DPA10103-DPB10401 DPA10103-DPB112601 DPA10103-DPB11501 DPA10103-DPB11601 DPA10103-DPB11901 DPA10103-DPB12301 DPA10103-DPB13101 DPA10103-DPB13401 DPA10103-DPB13901 DPA10103-DPB14001 DPA10103-DPB14101 DPA10103-DPB14801 DPA10103-DPB15001 DPA10103-DPB15901 DPA10104-DPB10101 DPA10104-DPB11501 DPA10105-DPB10101 DPA10105-DPB10401 DPA10105-DPB15001 DPA10106-DPB10101 DPA10201-DPB10101 DPA10201-DPB110601 DPA10201-DPB11501 DPA10201-DPB11601 DPA10201-DPB11901 DPA10202-DPB10101 DPA10202-DPB10201 DPA10202-DPB10202 DPA10202-DPB10401 DPA10202-DPB110601 DPA10202-DPB11901 DPA10202-DPB13101 DPA10202-DPB16501 DPA10301-DPB10101 DPA10301-DPB10201 DPA10301-DPB10202 DPA10301-DPB10401 DPA10301-DPB10402 DPA10301-DPB110501 DPA10301-DPB110601 DPA10301-DPB11801 DPA10301-DPB12301 DPA10301-DPB13901 DPA10301-DPB14001 DPA10301-DPB14901 DPA10301-DPB16501 DPA10301-DPB17501 DPA10301-DPB18001 DPA10401-DPB10101 DPA10401-DPB10201 DPA10401-DPB10202; note = HLAs: DPA10401-DPB10402 DPA10401-DPB10501 DPA10401-DPB110501 DPA10401-DPB14901
PPLLWAGWELLPDK

SEQ ID NO: 7075 - protein, 20 aa, synthetic construct
  source 1..20: note = Seed: KEPPFLWMGYELHPDKWTVQ; note = HLAs: DPA10103-DPB10101 DPA10103-DPB10201 DPA10103-DPB10202 DPA10103-DPB10401 DPA10103-DPB10402 DPA10103-DPB10501 DPA10103-DPB110501 DPA10103-DPB112601 DPA10103-DPB11601 DPA10103-DPB11901 DPA10103-DPB12301 DPA10103-DPB13101 DPA10103-DPB13401 DPA10103-DPB13901 DPA10103-DPB14001 DPA10103-DPB14101 DPA10103-DPB14801 DPA10103-DPB14901 DPA10103-DPB15001 DPA10103-DPB15101 DPA10103-DPB15501 DPA10103-DPB15901 DPA10103-DPB18001 DPA10104-DPB10101 DPA10105-DPB10101 DPA10105-DPB10401 DPA10105-DPB15001 DPA10106-DPB10101 DPA10201-DPB10101 DPA10201-DPB10201 DPA10201-DPB10202 DPA10201-DPB10401 DPA10201-DPB10501 DPA10201-DPB110601 DPA10201-DPB11501 DPA10201-DPB11601 DPA10201-DPB11901 DPA10201-DPB13401 DPA10201-DPB15501 DPA10202-DPB10101 DPA10202-DPB10201 DPA10202-DPB10202 DPA10202-DPB10401 DPA10202-DPB10501 DPA10202-DPB110601 DPA10202-DPB11101 DPA10202-DPB11301 DPA10202-DPB11801 DPA10202-DPB11901 DPA10202-DPB13101 DPA10202-DPB13801 DPA10202-DPB15501 DPA10202-DPB16501 DPA10301-DPB10101 DPA10301-DPB10201; note = HLAs: DPA10301-DPB10202 DPA10301-DPB10402 DPA10301-DPB110501 DPA10301-DPB110601 DPA10301-DPB11101 DPA10301-DPB11301 DPA10301-DPB14901 DPA10301-DPB15501 DPA10301-DPB16501 DPA10301-DPB17501 DPA10301-DPB18001 DPA10401-DPB10101 DPA10401-DPB10201 DPA10401-DPB10202 DPA10401-DPB10402 DPA10401-DPB10501 DPA10401-DPB110501 DPA10401-DPB14901
KEPPRLWTGFELLPDKWTVQ

SEQ ID NO: 7076 - protein, 20 aa, synthetic construct
  source 1..20: note = Seed: KEPPFLWMGYELHPDKWTVQ; note = HLAs: DPA10103-DPB10101 DPA10103-DPB10201 DPA10103-DPB10202 DPA10103-DPB10401 DPA10103-DPB10402 DPA10103-DPB10501 DPA10103-DPB110501 DPA10103-DPB112601 DPA10103-DPB11501 DPA10103-DPB11601 DPA10103-DPB11801 DPA10103-DPB11901 DPA10103-DPB12301 DPA10103-DPB13101 DPA10103-DPB13401 DPA10103-DPB13901 DPA10103-DPB14001 DPA10103-DPB14101 DPA10103-DPB14801 DPA10103-DPB14901 DPA10103-DPB15001 DPA10103-DPB15101 DPA10103-DPB15501 DPA10103-DPB15901 DPA10103-DPB18001 DPA10104-DPB10101 DPA10104-DPB11501 DPA10105-DPB10101 DPA10105-DPB10401 DPA10105-DPB11801 DPA10105-DPB15001 DPA10106-DPB10101 DPA10201-DPB10101 DPA10201-DPB10201 DPA10201-DPB10202 DPA10201-DPB10401 DPA10201-DPB10501 DPA10201-DPB110601 DPA10201-DPB11501 DPA10201-DPB11601 DPA10201-DPB11901 DPA10201-DPB13401 DPA10201-DPB15501 DPA10202-DPB10101 DPA10202-DPB10201 DPA10202-DPB10202 DPA10202-DPB10401 DPA10202-DPB10501 DPA10202-DPB110601 DPA10202-DPB11101 DPA10202-DPB11301 DPA10202-DPB11801 DPA10202-DPB11901 DPA10202-DPB13101 DPA10202-DPB13801; note = HLAs: DPA10202-DPB15501 DPA10202-DPB16501 DPA10301-DPB10101 DPA10301-DPB10201 DPA10301-DPB10202 DPA10301-DPB10401 DPA10301-DPB10402 DPA10301-DPB110501 DPA10301-DPB110601 DPA10301-DPB11301 DPA10301-DPB11801 DPA10301-DPB12301 DPA10301-DPB13901 DPA10301-DPB14001 DPA10301-DPB14901 DPA10301-DPB15501 DPA10301-DPB16501 DPA10301-DPB17501 DPA10301-DPB18001 DPA10401-DPB10101 DPA10401-DPB10201 DPA10401-DPB10202 DPA10401-DPB10402 DPA10401-DPB10501 DPA10401-DPB110501 DPA10401-DPB14901
KEPPFLWNGFELQPDKWTVQ

SEQ ID NO: 7077 - protein, 14 aa, synthetic construct
  source 1..14: note = Seed: PPFLWMGYELHPDK; note = HLAs: DRB1_1001 DPA10103-DPB10101 DPA10103-DPB10201 DPA10103-DPB10202 DPA10103-DPB10401 DPA10103-DPB112601 DPA10103-DPB11501 DPA10103-DPB11601 DPA10103-DPB11901 DPA10103-DPB12301 DPA10103-DPB13101 DPA10103-DPB13401 DPA10103-DPB13901 DPA10103-DPB14001 DPA10103-DPB14101 DPA10103-DPB14801 DPA10103-DPB15001 DPA10103-DPB15901 DPA10104-DPB10101 DPA10104-DPB11501 DPA10105-DPB10101 DPA10105-DPB10401 DPA10105-DPB15001 DPA10106-DPB10101 DPA10201-DPB10101 DPA10201-DPB110601 DPA10201-DPB11501 DPA10201-DPB11601 DPA10201-DPB11901 DPA10202-DPB10101 DPA10202-DPB10201 DPA10202-DPB10202 DPA10202-DPB10401 DPA10202-DPB110601 DPA10202-DPB11901 DPA10202-DPB13101 DPA10202-DPB16501 DPA10301-DPB10101 DPA10301-DPB10201 DPA10301-DPB10202 DPA10301-DPB10401 DPA10301-DPB10402 DPA10301-DPB110501 DPA10301-DPB110601 DPA10301-DPB11801 DPA10301-DPB12301 DPA10301-DPB13901 DPA10301-DPB14001 DPA10301-DPB14901 DPA10301-DPB15501 DPA10301-DPB16501 DPA10301-DPB17501 DPA10301-DPB18001 DPA10401-DPB10101 DPA10401-DPB10201; note = HLAs: DPA10401-DPB10202 DPA10401-DPB10402 DPA10401-DPB10501 DPA10401-DPB110501 DPA10401-DPB14901
PPWLWVGYELVPDK

SEQ ID NO: 7078 - protein, 14 aa, synthetic construct
  source 1..14: note = Seed: PPFLWMGYELHPDK; note = HLAs: DRB1_1001 DPA10103-DPB11501 DPA10103-DPB14001 DPA10104-DPB11501 DPA10201-DPB110601 DPA10201-DPB11501 DPA10201-DPB11901 DPA10202-DPB10201 DPA10202-DPB10202 DPA10202-DPB10401 DPA10202-DPB110601 DPA10202-DPB11901 DPA10202-DPB13101 DPA10301-DPB10201 DPA10301-DPB10202 DPA10301-DPB11801 DPA10301-DPB14001
PPFLWFGTELLPDK

SEQ ID NO: 7079 - protein, 20 aa, synthetic construct
  source 1..20: note = Seed: KEPPFLWMGYELHPDKWTVQ; note = HLAs: DRB1_0101 DRB1_0405 DRB1_1001 DPA10103-DPB10101 DPA10103-DPB10201 DPA10103-DPB10202 DPA10103-DPB10401 DPA10103-DPB10402 DPA10103-DPB10501 DPA10103-DPB110501 DPA10103-DPB112601 DPA10103-DPB11501 DPA10103-DPB11601 DPA10103-DPB11801 DPA10103-DPB11901 DPA10103-DPB12301 DPA10103-DPB13101 DPA10103-DPB13401 DPA10103-DPB13901 DPA10103-DPB14001 DPA10103-DPB14101 DPA10103-DPB14801 DPA10103-DPB14901 DPA10103-DPB15001 DPA10103-DPB15101 DPA10103-DPB15501 DPA10103-DPB15901 DPA10103-DPB18001 DPA10104-DPB10101 DPA10104-DPB11501 DPA10105-DPB10101 DPA10105-DPB10401 DPA10105-DPB11801 DPA10105-DPB15001 DPA10106-DPB10101 DPA10201-DPB10101 DPA10201-DPB10201 DPA10201-DPB10202 DPA10201-DPB10401 DPA10201-DPB10501 DPA10201-DPB110601 DPA10201-DPB11501 DPA10201-DPB11601 DPA10201-DPB11901 DPA10201-DPB13401 DPA10201-DPB15501 DPA10202-DPB10101 DPA10202-DPB10201 DPA10202-DPB10202 DPA10202-DPB10401 DPA10202-DPB10501 DPA10202-DPB110601 DPA10202-DPB11301 DPA10202-DPB11801 DPA10202-DPB11901 DPA10202-DPB13101; note = HLAs: DPA10202-DPB13801 DPA10202-DPB15501 DPA10202-DPB16501 DPA10301-DPB10101 DPA10301-DPB10201 DPA10301-DPB10202 DPA10301-DPB10401 DPA10301-DPB10402 DPA10301-DPB110501 DPA10301-DPB110601 DPA10301-DPB11101 DPA10301-DPB11301 DPA10301-DPB11801 DPA10301-DPB12301 DPA10301-DPB13901 DPA10301-DPB14001 DPA10301-DPB14901 DPA10301-DPB15501 DPA10301-DPB16501 DPA10301-DPB17501 DPA10301-DPB18001 DPA10401-DPB10101 DPA10401-DPB10201 DPA10401-DPB10202 DPA10401-DPB10402 DPA10401-DPB10501 DPA10401-DPB110501 DPA10401-DPB14901
KEPPFLWTGIELAPDKWTVQ

SEQ ID NO: 7080 - protein, 20 aa, synthetic construct
  source 1..20: note = Seed: KEPPFLWMGYELHPDKWTVQ; note = HLAs: DPA10103-DPB10101 DPA10103-DPB10201 DPA10103-DPB10202 DPA10103-DPB10401 DPA10103-DPB10402 DPA10103-DPB10501 DPA10103-DPB110501 DPA10103-DPB112601 DPA10103-DPB11501 DPA10103-DPB11601 DPA10103-DPB11801 DPA10103-DPB11901 DPA10103-DPB12301 DPA10103-DPB13101 DPA10103-DPB13401 DPA10103-DPB13901 DPA10103-DPB14001 DPA10103-DPB14101 DPA10103-DPB14801 DPA10103-DPB14901 DPA10103-DPB15001 DPA10103-DPB15101 DPA10103-DPB15501 DPA10103-DPB15901 DPA10103-DPB18001 DPA10104-DPB10101 DPA10104-DPB11501 DPA10105-DPB10101 DPA10105-DPB10401 DPA10105-DPB11801 DPA10105-DPB15001 DPA10106-DPB10101 DPA10201-DPB10101 DPA10201-DPB10201 DPA10201-DPB10202 DPA10201-DPB10401 DPA10201-DPB10501 DPA10201-DPB110601 DPA10201-DPB11501 DPA10201-DPB11601 DPA10201-DPB11901 DPA10201-DPB13401 DPA10201-DPB15501 DPA10202-DPB10101 DPA10202-DPB10201 DPA10202-DPB10202 DPA10202-DPB10401 DPA10202-DPB10501 DPA10202-DPB110601 DPA10202-DPB11101 DPA10202-DPB11301 DPA10202-DPB11801 DPA10202-DPB11901 DPA10202-DPB13101 DPA10202-DPB13801; note = HLAs: DPA10202-DPB15501 DPA10202-DPB16501 DPA10301-DPB10101 DPA10301-DPB10201 DPA10301-DPB10202 DPA10301-DPB10401 DPA10301-DPB10402 DPA10301-DPB110501 DPA10301-DPB110601 DPA10301-DPB11101 DPA10301-DPB11301 DPA10301-DPB11801 DPA10301-DPB12301 DPA10301-DPB13901 DPA10301-DPB14001 DPA10301-DPB14901 DPA10301-DPB15501 DPA10301-DPB16501 DPA10301-DPB17501 DPA10301-DPB18001 DPA10401-DPB10101 DPA10401-DPB10201 DPA10401-DPB10202 DPA10401-DPB10402 DPA10401-DPB10501 DPA10401-DPB110501 DPA10401-DPB14901
KEPPFLWDGFELYPDKWTVQ

SEQ ID NO: 7081 - protein, 20 aa, synthetic construct
  source 1..20: note = Seed: KEPPFLWMGYELHPDKWTVQ; note = HLAs: DRB1_0101 DPA10103-DPB10101 DPA10103-DPB10201 DPA10103-DPB10202 DPA10103-DPB10401 DPA10103-DPB10402 DPA10103-DPB10501 DPA10103-DPB110501 DPA10103-DPB112601 DPA10103-DPB11501 DPA10103-DPB11601 DPA10103-DPB11801 DPA10103-DPB11901 DPA10103-DPB12301 DPA10103-DPB13101 DPA10103-DPB13401 DPA10103-DPB13901 DPA10103-DPB14001 DPA10103-DPB14101 DPA10103-DPB14801 DPA10103-DPB14901 DPA10103-DPB15001 DPA10103-DPB15101 DPA10103-DPB15501 DPA10103-DPB15901 DPA10103-DPB18001 DPA10104-DPB10101 DPA10104-DPB11501 DPA10105-DPB10101 DPA10105-DPB10401 DPA10105-DPB11801 DPA10105-DPB15001 DPA10106-DPB10101 DPA10201-DPB10101 DPA10201-DPB10201 DPA10201-DPB10202 DPA10201-DPB10401 DPA10201-DPB10501 DPA10201-DPB110601 DPA10201-DPB11501 DPA10201-DPB11601 DPA10201-DPB11901 DPA10201-DPB13401 DPA10201-DPB15501 DPA10202-DPB10101 DPA10202-DPB10201 DPA10202-DPB10202 DPA10202-DPB10401 DPA10202-DPB10501 DPA10202-DPB110601 DPA10202-DPB11101 DPA10202-DPB11301 DPA10202-DPB11801 DPA10202-DPB11901 DPA10202-DPB13101; note = HLAs: DPA10202-DPB13801 DPA10202-DPB15501 DPA10202-DPB16501 DPA10301-DPB10101 DPA10301-DPB10201 DPA10301-DPB10202 DPA10301-DPB10401 DPA10301-DPB10402 DPA10301-DPB110501 DPA10301-DPB110601 DPA10301-DPB11301 DPA10301-DPB11801 DPA10301-DPB12301 DPA10301-DPB13901 DPA10301-DPB14001 DPA10301-DPB14901 DPA10301-DPB15501 DPA10301-DPB16501 DPA10301-DPB17501 DPA10301-DPB18001 DPA10401-DPB10101 DPA10401-DPB10201 DPA10401-DPB10202 DPA10401-DPB10402 DPA10401-DPB10501 DPA10401-DPB110501 DPA10401-DPB14901
KEPPFLWQGFELQPDKWTVQ

SEQ ID NO: 7082 - protein, 20 aa, synthetic construct
  source 1..20: note = Seed: KEPPFLWMGYELHPDKWTVQ; note = HLAs: DRB1_0101 DPA10103-DPB10101 DPA10103-DPB10201 DPA10103-DPB10202 DPA10103-DPB10401 DPA10103-DPB10402 DPA10103-DPB10501 DPA10103-DPB110501 DPA10103-DPB112601 DPA10103-DPB11501 DPA10103-DPB11601 DPA10103-DPB11801 DPA10103-DPB11901 DPA10103-DPB12301 DPA10103-DPB13101 DPA10103-DPB13401 DPA10103-DPB13901 DPA10103-DPB14001 DPA10103-DPB14101 DPA10103-DPB14801 DPA10103-DPB14901 DPA10103-DPB15001 DPA10103-DPB15101 DPA10103-DPB15501 DPA10103-DPB15901 DPA10103-DPB18001 DPA10104-DPB10101 DPA10104-DPB11501 DPA10105-DPB10101 DPA10105-DPB10401 DPA10105-DPB11801 DPA10105-DPB15001 DPA10106-DPB10101 DPA10201-DPB10101 DPA10201-DPB10201 DPA10201-DPB10202 DPA10201-DPB10401 DPA10201-DPB10501 DPA10201-DPB110601 DPA10201-DPB11501 DPA10201-DPB11601 DPA10201-DPB11901 DPA10201-DPB13401 DPA10201-DPB15501 DPA10202-DPB10101 DPA10202-DPB10201 DPA10202-DPB10202 DPA10202-DPB10401 DPA10202-DPB10501 DPA10202-DPB110601 DPA10202-DPB11101 DPA10202-DPB11301 DPA10202-DPB11801 DPA10202-DPB11901 DPA10202-DPB13101; note = HLAs: DPA10202-DPB13801 DPA10202-DPB15501 DPA10202-DPB16501 DPA10301-DPB10101 DPA10301-DPB10201 DPA10301-DPB10202 DPA10301-DPB10401 DPA10301-DPB10402 DPA10301-DPB110501 DPA10301-DPB110601 DPA10301-DPB11301 DPA10301-DPB11801 DPA10301-DPB12301 DPA10301-DPB13901 DPA10301-DPB14001 DPA10301-DPB14901 DPA10301-DPB15501 DPA10301-DPB16501 DPA10301-DPB17501 DPA10301-DPB18001 DPA10401-DPB10101 DPA10401-DPB10201 DPA10401-DPB10202 DPA10401-DPB10402 DPA10401-DPB10501 DPA10401-DPB110501 DPA10401-DPB14901
KEPPFLWNGMELLPDKWTVQ

SEQ ID NO: 7083 - protein, 14 aa, synthetic construct
  source 1..14: note = Seed: PPFLWMGYELHPDK; note = HLAs: DRB1_1001 DPA10103-DPB10101 DPA10103-DPB10201 DPA10103-DPB10202 DPA10103-DPB10401 DPA10103-DPB112601 DPA10103-DPB11501 DPA10103-DPB11601 DPA10103-DPB11901 DPA10103-DPB12301 DPA10103-DPB13101 DPA10103-DPB13401 DPA10103-DPB13901 DPA10103-DPB14001 DPA10103-DPB14101 DPA10103-DPB14801 DPA10103-DPB15001 DPA10103-DPB15901 DPA10104-DPB10101 DPA10104-DPB11501 DPA10105-DPB10101 DPA10105-DPB10401 DPA10105-DPB15001 DPA10106-DPB10101 DPA10201-DPB10101 DPA10201-DPB110601 DPA10201-DPB11501 DPA10201-DPB11601 DPA10201-DPB11901 DPA10202-DPB10101 DPA10202-DPB10201 DPA10202-DPB10202 DPA10202-DPB10401 DPA10202-DPB110601 DPA10202-DPB11901 DPA10202-DPB13101 DPA10202-DPB16501 DPA10301-DPB10101 DPA10301-DPB10201 DPA10301-DPB10202 DPA10301-DPB10401 DPA10301-DPB10402 DPA10301-DPB110501 DPA10301-DPB110601 DPA10301-DPB11801 DPA10301-DPB12301 DPA10301-DPB13901 DPA10301-DPB14001 DPA10301-DPB14901 DPA10301-DPB15501 DPA10301-DPB16501 DPA10301-DPB17501 DPA10301-DPB18001 DPA10401-DPB10101 DPA10401-DPB10201; note = HLAs: DPA10401-DPB10202 DPA10401-DPB10402 DPA10401-DPB10501 DPA10401-DPB110501 DPA10401-DPB14901
PPFLWAGMELVPDK

SEQ ID NO: 7084 - protein, 20 aa, synthetic construct
  source 1..20: note = Seed: KEPPFLWMGYELHPDKWTVQ; note = HLAs: DRB1_1001 DPA10103-DPB10101 DPA10103-DPB10201 DPA10103-DPB10202 DPA10103-DPB10401 DPA10103-DPB10402 DPA10103-DPB10501 DPA10103-DPB110501 DPA10103-DPB112601 DPA10103-DPB11501 DPA10103-DPB11601 DPA10103-DPB11801 DPA10103-DPB11901 DPA10103-DPB12301 DPA10103-DPB13101 DPA10103-DPB13401 DPA10103-DPB13901 DPA10103-DPB14001 DPA10103-DPB14101 DPA10103-DPB14801 DPA10103-DPB14901 DPA10103-DPB15001 DPA10103-DPB15101 DPA10103-DPB15501 DPA10103-DPB15901 DPA10103-DPB18001 DPA10104-DPB10101 DPA10104-DPB11501 DPA10105-DPB10101 DPA10105-DPB10401 DPA10105-DPB11801 DPA10105-DPB15001 DPA10106-DPB10101 DPA10201-DPB10101 DPA10201-DPB10201 DPA10201-DPB10202 DPA10201-DPB10401 DPA10201-DPB10501 DPA10201-DPB110601 DPA10201-DPB11501 DPA10201-DPB11601 DPA10201-DPB11901 DPA10201-DPB13401 DPA10201-DPB15501 DPA10202-DPB10101 DPA10202-DPB10201 DPA10202-DPB10202 DPA10202-DPB10401 DPA10202-DPB10501 DPA10202-DPB110601 DPA10202-DPB11101 DPA10202-DPB11301 DPA10202-DPB11801 DPA10202-DPB11901 DPA10202-DPB13101; note = HLAs: DPA10202-DPB13801 DPA10202-DPB15501 DPA10202-DPB16501 DPA10301-DPB10101 DPA10301-DPB10201 DPA10301-DPB10202 DPA10301-DPB10401 DPA10301-DPB10402 DPA10301-DPB110501 DPA10301-DPB110601 DPA10301-DPB11101 DPA10301-DPB11301 DPA10301-DPB11801 DPA10301-DPB12301 DPA10301-DPB13901 DPA10301-DPB14001 DPA10301-DPB14901 DPA10301-DPB15501 DPA10301-DPB16501 DPA10301-DPB17501 DPA10301-DPB18001 DPA10401-DPB10101 DPA10401-DPB10201 DPA10401-DPB10202 DPA10401-DPB10402 DPA10401-DPB10501 DPA10401-DPB110501 DPA10401-DPB14901
KEPPYLWIGFELEPDKWTVQ

SEQ ID NO: 7085 - protein, 14 aa, synthetic construct
  source 1..14: note = Seed: PPFLWMGYELHPDK; note = HLAs: DPA10103-DPB10101 DPA10103-DPB10201 DPA10103-DPB10202 DPA10103-DPB10401 DPA10103-DPB112601 DPA10103-DPB11501 DPA10103-DPB11601 DPA10103-DPB11901 DPA10103-DPB12301 DPA10103-DPB13101 DPA10103-DPB13401 DPA10103-DPB13901 DPA10103-DPB14001 DPA10103-DPB14101 DPA10103-DPB14801 DPA10103-DPB15001 DPA10103-DPB15901 DPA10104-DPB10101 DPA10104-DPB11501 DPA10105-DPB10101 DPA10105-DPB10401 DPA10105-DPB15001 DPA10106-DPB10101 DPA10201-DPB10101 DPA10201-DPB110601 DPA10201-DPB11501 DPA10201-DPB11601 DPA10201-DPB11901 DPA10202-DPB10101 DPA10202-DPB10201 DPA10202-DPB10202 DPA10202-DPB10401 DPA10202-DPB110601 DPA10202-DPB11901 DPA10202-DPB13101 DPA10202-DPB16501 DPA10301-DPB10101 DPA10301-DPB10201 DPA10301-DPB10202 DPA10301-DPB10401 DPA10301-DPB10402 DPA10301-DPB110501 DPA10301-DPB110601 DPA10301-DPB11801 DPA10301-DPB12301 DPA10301-DPB13901 DPA10301-DPB14001 DPA10301-DPB14901 DPA10301-DPB15501 DPA10301-DPB16501 DPA10301-DPB17501 DPA10301-DPB18001 DPA10401-DPB10101 DPA10401-DPB10201; note = HLAs: DPA10401-DPB10202 DPA10401-DPB10402 DPA10401-DPB10501 DPA10401-DPB110501 DPA10401-DPB14901
PPLLWTGFELHPDK

SEQ ID NO: 7086 - protein, 14 aa, synthetic construct
  source 1..14: note = Seed: PPFLWMGYELHPDK; note = HLAs: DPA10103-DPB10101 DPA10103-DPB10201 DPA10103-DPB10202 DPA10103-DPB10401 DPA10103-DPB112601 DPA10103-DPB11501 DPA10103-DPB11601 DPA10103-DPB11901 DPA10103-DPB12301 DPA10103-DPB13101 DPA10103-DPB13401 DPA10103-DPB13901 DPA10103-DPB14001 DPA10103-DPB14101 DPA10103-DPB14801 DPA10103-DPB15001 DPA10103-DPB15901 DPA10104-DPB10101 DPA10104-DPB11501 DPA10105-DPB10101 DPA10105-DPB10401 DPA10105-DPB15001 DPA10106-DPB10101 DPA10201-DPB10101 DPA10201-DPB110601 DPA10201-DPB11501 DPA10201-DPB11601 DPA10201-DPB11901 DPA10202-DPB10101 DPA10202-DPB10201 DPA10202-DPB10202 DPA10202-DPB10401 DPA10202-DPB110601 DPA10202-DPB11901 DPA10202-DPB13101 DPA10202-DPB16501 DPA10301-DPB10101 DPA10301-DPB10201 DPA10301-DPB10202 DPA10301-DPB10401 DPA10301-DPB10402 DPA10301-DPB110501 DPA10301-DPB110601 DPA10301-DPB11801 DPA10301-DPB12301 DPA10301-DPB13901 DPA10301-DPB14001 DPA10301-DPB14901 DPA10301-DPB16501 DPA10301-DPB17501 DPA10301-DPB18001 DPA10401-DPB10101 DPA10401-DPB10201 DPA10401-DPB10202; note = HLAs: DPA10401-DPB10402 DPA10401-DPB10501 DPA10401-DPB110501 DPA10401-DPB14901
PPMLWHGFELFPDK

SEQ ID NO: 7087 - protein, 14 aa, synthetic construct
  source 1..14: note = Seed: PPFLWMGYELHPDK; note = HLAs: DPA10103-DPB10101 DPA10103-DPB10201 DPA10103-DPB10202 DPA10103-DPB10401 DPA10103-DPB112601 DPA10103-DPB11601 DPA10103-DPB11901 DPA10103-DPB12301 DPA10103-DPB13101 DPA10103-DPB13401 DPA10103-DPB13901 DPA10103-DPB14101 DPA10103-DPB14801 DPA10103-DPB15001 DPA10104-DPB10101 DPA10105-DPB10101 DPA10105-DPB10401 DPA10105-DPB15001 DPA10106-DPB10101 DPA10201-DPB10101 DPA10201-DPB110601 DPA10201-DPB11601 DPA10201-DPB11901 DPA10202-DPB10101 DPA10202-DPB10201 DPA10202-DPB10202 DPA10202-DPB10401 DPA10202-DPB110601 DPA10202-DPB11901 DPA10202-DPB13101 DPA10202-DPB16501 DPA10301-DPB10101 DPA10301-DPB110601 DPA10301-DPB15501 DPA10301-DPB16501 DPA10401-DPB10101 DPA10401-DPB10201 DPA10401-DPB10202 DPA10401-DPB10501
PPRLWTGFELLPDK

SEQ ID NO: 7088 - protein, 14 aa, synthetic construct
  source 1..14: note = Seed: PPFLWMGYELHPDK; note = HLAs: DPA10103-DPB10101 DPA10103-DPB10201 DPA10103-DPB10202 DPA10103-DPB10401 DPA10103-DPB112601 DPA10103-DPB11501 DPA10103-DPB11601 DPA10103-DPB11901 DPA10103-DPB12301 DPA10103-DPB13101 DPA10103-DPB13401 DPA10103-DPB13901 DPA10103-DPB14001 DPA10103-DPB14101 DPA10103-DPB14801 DPA10103-DPB15001 DPA10103-DPB15901 DPA10104-DPB10101 DPA10104-DPB11501 DPA10105-DPB10101 DPA10105-DPB10401 DPA10105-DPB15001 DPA10106-DPB10101 DPA10201-DPB10101 DPA10201-DPB110601 DPA10201-DPB11501 DPA10201-DPB11601 DPA10201-DPB11901 DPA10202-DPB10101 DPA10202-DPB10201 DPA10202-DPB10202 DPA10202-DPB10401 DPA10202-DPB110601 DPA10202-DPB11901 DPA10202-DPB13101 DPA10202-DPB16501 DPA10301-DPB10101 DPA10301-DPB10201 DPA10301-DPB10202 DPA10301-DPB10401 DPA10301-DPB10402 DPA10301-DPB110501 DPA10301-DPB110601 DPA10301-DPB11801 DPA10301-DPB12301 DPA10301-DPB13901 DPA10301-DPB14001 DPA10301-DPB14901 DPA10301-DPB15501 DPA10301-DPB16501 DPA10301-DPB17501 DPA10301-DPB18001 DPA10401-DPB10101 DPA10401-DPB10201; note = HLAs: DPA10401-DPB10202 DPA10401-DPB10402 DPA10401-DPB10501 DPA10401-DPB110501 DPA10401-DPB14901
PPILWFGFELIPDK

SEQ ID NO: 7089 - protein, 20 aa, synthetic construct
  source 1..20: note = Seed: KEPPFLWMGYELHPDKWTVQ; note = HLAs: DRB1_0101 DRB1_0405 DRB1_1001 DPA10103-DPB10101 DPA10103-DPB10201 DPA10103-DPB10202 DPA10103-DPB10401 DPA10103-DPB10402 DPA10103-DPB10501 DPA10103-DPB110501 DPA10103-DPB112601 DPA10103-DPB11501 DPA10103-DPB11601 DPA10103-DPB11801 DPA10103-DPB11901 DPA10103-DPB12301 DPA10103-DPB13401 DPA10103-DPB13901 DPA10103-DPB14001 DPA10103-DPB14101 DPA10103-DPB14801 DPA10103-DPB14901 DPA10103-DPB15101 DPA10103-DPB15501 DPA10103-DPB15901 DPA10103-DPB18001 DPA10104-DPB10101 DPA10104-DPB11501 DPA10105-DPB10101 DPA10105-DPB10401 DPA10105-DPB11801 DPA10106-DPB10101 DPA10201-DPB10101 DPA10201-DPB10201 DPA10201-DPB10202 DPA10201-DPB10401 DPA10201-DPB10501 DPA10201-DPB110601 DPA10201-DPB11501 DPA10201-DPB11601 DPA10201-DPB11901 DPA10201-DPB13401 DPA10201-DPB15501 DPA10202-DPB10101 DPA10202-DPB10201 DPA10202-DPB10202 DPA10202-DPB10401 DPA10202-DPB10501 DPA10202-DPB110601 DPA10202-DPB11101 DPA10202-DPB11301 DPA10202-DPB11801 DPA10202-DPB11901 DPA10202-DPB13101 DPA10202-DPB13801 DPA10202-DPB15501; note = HLAs: DPA10202-DPB16501 DPA10301-DPB10101 DPA10301-DPB10201 DPA10301-DPB10202 DPA10301-DPB10401 DPA10301-DPB10402 DPA10301-DPB110501 DPA10301-DPB110601 DPA10301-DPB11101 DPA10301-DPB11301 DPA10301-DPB11801 DPA10301-DPB12301 DPA10301-DPB13901 DPA10301-DPB14001 DPA10301-DPB14901 DPA10301-DPB15501 DPA10301-DPB16501 DPA10301-DPB17501 DPA10301-DPB18001 DPA10401-DPB10201 DPA10401-DPB10202 DPA10401-DPB10402 DPA10401-DPB10501 DPA10401-DPB110501 DPA10401-DPB14901
KEPPFLWLGIELLPDKWTVQ

SEQ ID NO: 7090 - protein, 14 aa, synthetic construct
  source 1..14: note = Seed: PPFLWMGYELHPDK; note = HLAs: DRB1_1001 DPA10103-DPB10101 DPA10103-DPB10201 DPA10103-DPB10202 DPA10103-DPB10401 DPA10103-DPB112601 DPA10103-DPB11501 DPA10103-DPB11601 DPA10103-DPB11901 DPA10103-DPB12301 DPA10103-DPB13101 DPA10103-DPB13401 DPA10103-DPB13901 DPA10103-DPB14001 DPA10103-DPB14101 DPA10103-DPB14801 DPA10103-DPB15001 DPA10103-DPB15901 DPA10104-DPB10101 DPA10104-DPB11501 DPA10105-DPB10101 DPA10105-DPB10401 DPA10105-DPB15001 DPA10106-DPB10101 DPA10201-DPB10101 DPA10201-DPB110601 DPA10201-DPB11501 DPA10201-DPB11601 DPA10201-DPB11901 DPA10202-DPB10101 DPA10202-DPB10201 DPA10202-DPB10202 DPA10202-DPB10401 DPA10202-DPB110601 DPA10202-DPB11901 DPA10202-DPB13101 DPA10202-DPB16501 DPA10301-DPB10101 DPA10301-DPB10201 DPA10301-DPB10202 DPA10301-DPB10401 DPA10301-DPB10402 DPA10301-DPB110501 DPA10301-DPB110601 DPA10301-DPB11801 DPA10301-DPB12301 DPA10301-DPB13901 DPA10301-DPB14001 DPA10301-DPB14901 DPA10301-DPB15501 DPA10301-DPB16501 DPA10301-DPB17501 DPA10301-DPB18001 DPA10401-DPB10101 DPA10401-DPB10201; note = HLAs: DPA10401-DPB10202 DPA10401-DPB10402 DPA10401-DPB10501 DPA10401-DPB110501 DPA10401-DPB14901
PPYLWIGYELFPDK

SEQ ID NO: 7091 - protein, 20 aa, synthetic construct
  source 1..20: note = Seed: KEPPFLWMGYELHPDKWTVQ; note = HLAs: DPA10103-DPB10101 DPA10103-DPB10201 DPA10103-DPB10202 DPA10103-DPB10401 DPA10103-DPB10402 DPA10103-DPB10501 DPA10103-DPB110501 DPA10103-DPB112601 DPA10103-DPB11501 DPA10103-DPB11601 DPA10103-DPB11801 DPA10103-DPB11901 DPA10103-DPB12301 DPA10103-DPB13101 DPA10103-DPB13401 DPA10103-DPB13901 DPA10103-DPB14001 DPA10103-DPB14101 DPA10103-DPB14801 DPA10103-DPB14901 DPA10103-DPB15001 DPA10103-DPB15101 DPA10103-DPB15501 DPA10103-DPB15901 DPA10103-DPB18001 DPA10104-DPB10101 DPA10104-DPB11501 DPA10105-DPB10101 DPA10105-DPB10401 DPA10105-DPB11801 DPA10105-DPB15001 DPA10106-DPB10101 DPA10201-DPB10101 DPA10201-DPB10201 DPA10201-DPB10202 DPA10201-DPB10401 DPA10201-DPB10501 DPA10201-DPB110601 DPA10201-DPB11501 DPA10201-DPB11601 DPA10201-DPB11901 DPA10201-DPB13401 DPA10201-DPB15501 DPA10202-DPB10101 DPA10202-DPB10201 DPA10202-DPB10202 DPA10202-DPB10401 DPA10202-DPB10501 DPA10202-DPB110601 DPA10202-DPB11101 DPA10202-DPB11301 DPA10202-DPB11801 DPA10202-DPB11901 DPA10202-DPB13101 DPA10202-DPB13801; note = HLAs: DPA10202-DPB15501 DPA10202-DPB16501 DPA10301-DPB10101 DPA10301-DPB10201 DPA10301-DPB10202 DPA10301-DPB10401 DPA10301-DPB10402 DPA10301-DPB110501 DPA10301-DPB110601 DPA10301-DPB11101 DPA10301-DPB11301 DPA10301-DPB11801 DPA10301-DPB12301 DPA10301-DPB13901 DPA10301-DPB14001 DPA10301-DPB14901 DPA10301-DPB15501 DPA10301-DPB16501 DPA10301-DPB17501 DPA10301-DPB18001 DPA10401-DPB10101 DPA10401-DPB10201 DPA10401-DPB10202 DPA10401-DPB10402 DPA10401-DPB10501 DPA10401-DPB110501 DPA10401-DPB14901
KEPPLLWHGFELTPDKWTVQ

SEQ ID NO: 7092 - protein, 20 aa, synthetic construct
  source 1..20: note = Seed: KEPPFLWMGYELHPDKWTVQ; note = HLAs: DRB1_1001 DPA10103-DPB10101 DPA10103-DPB10201 DPA10103-DPB10202 DPA10103-DPB10401 DPA10103-DPB10402 DPA10103-DPB10501 DPA10103-DPB110501 DPA10103-DPB112601 DPA10103-DPB11501 DPA10103-DPB11601 DPA10103-DPB11801 DPA10103-DPB11901 DPA10103-DPB12301 DPA10103-DPB13101 DPA10103-DPB13401 DPA10103-DPB13901 DPA10103-DPB14001 DPA10103-DPB14101 DPA10103-DPB14801 DPA10103-DPB14901 DPA10103-DPB15001 DPA10103-DPB15101 DPA10103-DPB15501 DPA10103-DPB15901 DPA10103-DPB18001 DPA10104-DPB10101 DPA10104-DPB11501 DPA10105-DPB10101 DPA10105-DPB10401 DPA10105-DPB11801 DPA10105-DPB15001 DPA10106-DPB10101 DPA10201-DPB10101 DPA10201-DPB10201 DPA10201-DPB10202 DPA10201-DPB10401 DPA10201-DPB10501 DPA10201-DPB110601 DPA10201-DPB11501 DPA10201-DPB11601 DPA10201-DPB11901 DPA10201-DPB13401 DPA10201-DPB15501 DPA10202-DPB10101 DPA10202-DPB10201 DPA10202-DPB10202 DPA10202-DPB10401 DPA10202-DPB10501 DPA10202-DPB110601 DPA10202-DPB11101 DPA10202-DPB11301 DPA10202-DPB11801 DPA10202-DPB11901 DPA10202-DPB13101; note = HLAs: DPA10202-DPB13801 DPA10202-DPB15501 DPA10202-DPB16501 DPA10301-DPB10101 DPA10301-DPB10201 DPA10301-DPB10202 DPA10301-DPB10401 DPA10301-DPB10402 DPA10301-DPB110501 DPA10301-DPB110601 DPA10301-DPB11101 DPA10301-DPB11301 DPA10301-DPB11801 DPA10301-DPB12301 DPA10301-DPB13901 DPA10301-DPB14001 DPA10301-DPB14901 DPA10301-DPB15501 DPA10301-DPB16501 DPA10301-DPB17501 DPA10301-DPB18001 DPA10401-DPB10101 DPA10401-DPB10201 DPA10401-DPB10202 DPA10401-DPB10402 DPA10401-DPB10501 DPA10401-DPB110501 DPA10401-DPB14901
KEPPFLWSGYELNPDKWTVQ

SEQ ID NO: 7093 - protein, 20 aa, synthetic construct
  source 1..20: note = Seed: KEPPFLWMGYELHPDKWTVQ; note = HLAs: DRB1_0101 DPA10103-DPB10101 DPA10103-DPB10201 DPA10103-DPB10202 DPA10103-DPB10401 DPA10103-DPB10402 DPA10103-DPB10501 DPA10103-DPB110501 DPA10103-DPB112601 DPA10103-DPB11501 DPA10103-DPB11601 DPA10103-DPB11801 DPA10103-DPB11901 DPA10103-DPB12301 DPA10103-DPB13101 DPA10103-DPB13401 DPA10103-DPB13901 DPA10103-DPB14001 DPA10103-DPB14101 DPA10103-DPB14801 DPA10103-DPB14901 DPA10103-DPB15001 DPA10103-DPB15101 DPA10103-DPB15501 DPA10103-DPB15901 DPA10103-DPB18001 DPA10104-DPB10101 DPA10104-DPB11501 DPA10105-DPB10101 DPA10105-DPB10401 DPA10105-DPB11801 DPA10105-DPB15001 DPA10106-DPB10101 DPA10201-DPB10101 DPA10201-DPB10201 DPA10201-DPB10202 DPA10201-DPB10401 DPA10201-DPB10501 DPA10201-DPB110601 DPA10201-DPB11501 DPA10201-DPB11601 DPA10201-DPB11901 DPA10201-DPB13401 DPA10201-DPB15501 DPA10202-DPB10101 DPA10202-DPB10201 DPA10202-DPB10202 DPA10202-DPB10401 DPA10202-DPB10501 DPA10202-DPB110601 DPA10202-DPB11101 DPA10202-DPB11301 DPA10202-DPB11801 DPA10202-DPB11901 DPA10202-DPB13101; note = HLAs: DPA10202-DPB13801 DPA10202-DPB15501 DPA10202-DPB16501 DPA10301-DPB10101 DPA10301-DPB10201 DPA10301-DPB10202 DPA10301-DPB10401 DPA10301-DPB10402 DPA10301-DPB110501 DPA10301-DPB110601 DPA10301-DPB11101 DPA10301-DPB11301 DPA10301-DPB11801 DPA10301-DPB12301 DPA10301-DPB13901 DPA10301-DPB14001 DPA10301-DPB14901 DPA10301-DPB15501 DPA10301-DPB16501 DPA10301-DPB17501 DPA10301-DPB18001 DPA10401-DPB10101 DPA10401-DPB10201 DPA10401-DPB10202 DPA10401-DPB10402 DPA10401-DPB10501 DPA10401-DPB110501 DPA10401-DPB14901
KEPPYLWEGYELLPDKWTVQ

SEQ ID NO: 7094 - protein, 20 aa, synthetic construct
  source 1..20: note = Seed: KEPPFLWMGYELHPDKWTVQ; note = HLAs: DRB1_0101 DPA10103-DPB10101 DPA10103-DPB10201 DPA10103-DPB10202 DPA10103-DPB10401 DPA10103-DPB10402 DPA10103-DPB10501 DPA10103-DPB110501 DPA10103-DPB112601 DPA10103-DPB11501 DPA10103-DPB11601 DPA10103-DPB11801 DPA10103-DPB11901 DPA10103-DPB12301 DPA10103-DPB13101 DPA10103-DPB13401 DPA10103-DPB13901 DPA10103-DPB14001 DPA10103-DPB14101 DPA10103-DPB14801 DPA10103-DPB14901 DPA10103-DPB15001 DPA10103-DPB15101 DPA10103-DPB15501 DPA10103-DPB15901 DPA10103-DPB18001 DPA10104-DPB10101 DPA10104-DPB11501 DPA10105-DPB10101 DPA10105-DPB10401 DPA10105-DPB11801 DPA10105-DPB15001 DPA10106-DPB10101 DPA10201-DPB10101 DPA10201-DPB10201 DPA10201-DPB10202 DPA10201-DPB10401 DPA10201-DPB10501 DPA10201-DPB110601 DPA10201-DPB11501 DPA10201-DPB11601 DPA10201-DPB11901 DPA10201-DPB13401 DPA10201-DPB15501 DPA10202-DPB10101 DPA10202-DPB10201 DPA10202-DPB10202 DPA10202-DPB10401 DPA10202-DPB10501 DPA10202-DPB110601 DPA10202-DPB11101 DPA10202-DPB11301 DPA10202-DPB11801 DPA10202-DPB11901 DPA10202-DPB13101; note = HLAs: DPA10202-DPB13801 DPA10202-DPB15501 DPA10202-DPB16501 DPA10301-DPB10101 DPA10301-DPB10201 DPA10301-DPB10202 DPA10301-DPB10401 DPA10301-DPB10402 DPA10301-DPB110501 DPA10301-DPB110601 DPA10301-DPB11101 DPA10301-DPB11301 DPA10301-DPB11801 DPA10301-DPB12301 DPA10301-DPB13901 DPA10301-DPB14001 DPA10301-DPB14901 DPA10301-DPB15501 DPA10301-DPB16501 DPA10301-DPB17501 DPA10301-DPB18001 DPA10401-DPB10101 DPA10401-DPB10201 DPA10401-DPB10202 DPA10401-DPB10402 DPA10401-DPB10501 DPA10401-DPB110501 DPA10401-DPB14901
KEPPYLWSGLELVPDKWTVQ

SEQ ID NO: 7095 - protein, 14 aa, synthetic construct
  source 1..14: note = Seed: PPFLWMGYELHPDK; note = HLAs: DPA10103-DPB10101 DPA10103-DPB10201 DPA10103-DPB10202 DPA10103-DPB10401 DPA10103-DPB112601 DPA10103-DPB11501 DPA10103-DPB11601 DPA10103-DPB11901 DPA10103-DPB12301 DPA10103-DPB13101 DPA10103-DPB13401 DPA10103-DPB13901 DPA10103-DPB14001 DPA10103-DPB14101 DPA10103-DPB14801 DPA10103-DPB15001 DPA10103-DPB15901 DPA10104-DPB10101 DPA10104-DPB11501 DPA10105-DPB10101 DPA10105-DPB10401 DPA10105-DPB15001 DPA10106-DPB10101 DPA10201-DPB10101 DPA10201-DPB110601 DPA10201-DPB11501 DPA10201-DPB11601 DPA10201-DPB11901 DPA10202-DPB10101 DPA10202-DPB10201 DPA10202-DPB10202 DPA10202-DPB10401 DPA10202-DPB110601 DPA10202-DPB11901 DPA10202-DPB13101 DPA10202-DPB16501 DPA10301-DPB10101 DPA10301-DPB10201 DPA10301-DPB10202 DPA10301-DPB10402 DPA10301-DPB110501 DPA10301-DPB110601 DPA10301-DPB11801 DPA10301-DPB14001 DPA10301-DPB14901 DPA10301-DPB16501 DPA10301-DPB17501 DPA10301-DPB18001 DPA10401-DPB10101 DPA10401-DPB10201 DPA10401-DPB10202 DPA10401-DPB10402 DPA10401-DPB10501 DPA10401-DPB110501; note = HLAs: DPA10401-DPB14901
PPCLWVGFELIPDK

SEQ ID NO: 7096 - protein, 20 aa, synthetic construct
  source 1..20: note = Seed: KEPPFLWMGYELHPDKWTVQ; note = HLAs: DRB1_0101 DRB1_0405 DRB1_1001 DPA10103-DPB11501 DPA10103-DPB11801 DPA10103-DPB13401 DPA10103-DPB15901 DPA10104-DPB11501 DPA10105-DPB11801 DPA10106-DPB10101 DPA10201-DPB10101 DPA10201-DPB10201 DPA10201-DPB10202 DPA10201-DPB10401 DPA10201-DPB10501 DPA10201-DPB110601 DPA10201-DPB11501 DPA10201-DPB11601 DPA10201-DPB11901 DPA10201-DPB13401 DPA10202-DPB10101 DPA10202-DPB10201 DPA10202-DPB10202 DPA10202-DPB10401 DPA10202-DPB10501 DPA10202-DPB110601 DPA10202-DPB11101 DPA10202-DPB11301 DPA10202-DPB11801 DPA10202-DPB11901 DPA10202-DPB13101 DPA10202-DPB13801 DPA10202-DPB15501 DPA10202-DPB16501 DPA10301-DPB10201 DPA10301-DPB10202 DPA10301-DPB10402 DPA10301-DPB110501 DPA10301-DPB11801 DPA10301-DPB14001 DPA10301-DPB14901 DPA10301-DPB16501 DPA10301-DPB17501 DPA10301-DPB18001 DPA10401-DPB10402 DPA10401-DPB110501 DPA10401-DPB14901
KEPPFLWIGTELLPDKWTVQ

SEQ ID NO: 7097 - protein, 14 aa, synthetic construct
  source 1..14: note = Seed: PPFLWMGYELHPDK; note = HLAs: DRB1_1001 DPA10103-DPB10201 DPA10103-DPB10202 DPA10103-DPB10401 DPA10103-DPB112601 DPA10103-DPB11501 DPA10103-DPB11601 DPA10103-DPB11901 DPA10103-DPB12301 DPA10103-DPB13401 DPA10103-DPB13901 DPA10103-DPB14001 DPA10103-DPB14101 DPA10103-DPB14801 DPA10103-DPB15001 DPA10103-DPB15901 DPA10104-DPB11501 DPA10105-DPB10401 DPA10105-DPB15001 DPA10201-DPB110601 DPA10201-DPB11501 DPA10201-DPB11601 DPA10201-DPB11901 DPA10202-DPB10201 DPA10202-DPB10202 DPA10202-DPB10401 DPA10202-DPB110601 DPA10202-DPB11901 DPA10202-DPB13101 DPA10202-DPB16501 DPA10301-DPB10201 DPA10301-DPB10202 DPA10301-DPB10401 DPA10301-DPB10402 DPA10301-DPB110501 DPA10301-DPB110601 DPA10301-DPB11801 DPA10301-DPB12301 DPA10301-DPB13901 DPA10301-DPB14001 DPA10301-DPB14901 DPA10301-DPB15501 DPA10301-DPB17501 DPA10301-DPB18001 DPA10401-DPB10201 DPA10401-DPB10202 DPA10401-DPB10402 DPA10401-DPB10501 DPA10401-DPB110501 DPA10401-DPB14901
PPFLWHGVELLPDK

SEQ ID NO: 7098 - protein, 14 aa, synthetic construct
  source 1..14: note = Seed: PPFLWMGYELHPDK; note = HLAs: DRB1_1001 DPA10103-DPB10101 DPA10103-DPB10201 DPA10103-DPB10202 DPA10103-DPB10401 DPA10103-DPB112601 DPA10103-DPB11501 DPA10103-DPB11601 DPA10103-DPB11901 DPA10103-DPB12301 DPA10103-DPB13101 DPA10103-DPB13401 DPA10103-DPB13901 DPA10103-DPB14001 DPA10103-DPB14101 DPA10103-DPB14801 DPA10103-DPB15001 DPA10103-DPB15901 DPA10104-DPB10101 DPA10104-DPB11501 DPA10105-DPB10101 DPA10105-DPB10401 DPA10105-DPB15001 DPA10106-DPB10101 DPA10201-DPB10101 DPA10201-DPB110601 DPA10201-DPB11501 DPA10201-DPB11601 DPA10201-DPB11901 DPA10202-DPB10101 DPA10202-DPB10201 DPA10202-DPB10202 DPA10202-DPB10401 DPA10202-DPB110601 DPA10202-DPB11901 DPA10202-DPB13101 DPA10202-DPB16501 DPA10301-DPB10101 DPA10301-DPB10201 DPA10301-DPB10202 DPA10301-DPB10401 DPA10301-DPB10402 DPA10301-DPB110501 DPA10301-DPB110601 DPA10301-DPB11801 DPA10301-DPB12301 DPA10301-DPB13901 DPA10301-DPB14001 DPA10301-DPB14901 DPA10301-DPB15501 DPA10301-DPB16501 DPA10301-DPB17501 DPA10301-DPB18001 DPA10401-DPB10101 DPA10401-DPB10201; note = HLAs: DPA10401-DPB10202 DPA10401-DPB10402 DPA10401-DPB10501 DPA10401-DPB110501 DPA10401-DPB14901
PPFLWVGWELAPDK

SEQ ID NO: 7099 - protein, 20 aa, synthetic construct
  source 1..20: note = Seed: KEPPFLWMGYELHPDKWTVQ; note = HLAs: DPA10103-DPB10101 DPA10103-DPB10201 DPA10103-DPB10202 DPA10103-DPB10401 DPA10103-DPB10402 DPA10103-DPB10501 DPA10103-DPB110501 DPA10103-DPB112601 DPA10103-DPB11501 DPA10103-DPB11601 DPA10103-DPB11801 DPA10103-DPB11901 DPA10103-DPB12301 DPA10103-DPB13101 DPA10103-DPB13401 DPA10103-DPB13901 DPA10103-DPB14001 DPA10103-DPB14101 DPA10103-DPB14801 DPA10103-DPB14901 DPA10103-DPB15001 DPA10103-DPB15101 DPA10103-DPB15501 DPA10103-DPB15901 DPA10103-DPB18001 DPA10104-DPB10101 DPA10104-DPB11501 DPA10105-DPB10101 DPA10105-DPB10401 DPA10105-DPB11801 DPA10105-DPB15001 DPA10106-DPB10101 DPA10201-DPB10101 DPA10201-DPB10201 DPA10201-DPB10202 DPA10201-DPB10401 DPA10201-DPB10501 DPA10201-DPB110601 DPA10201-DPB11501 DPA10201-DPB11601 DPA10201-DPB11901 DPA10201-DPB13401 DPA10201-DPB15501 DPA10202-DPB10101 DPA10202-DPB10201 DPA10202-DPB10202 DPA10202-DPB10401 DPA10202-DPB10501 DPA10202-DPB110601 DPA10202-DPB11101 DPA10202-DPB11301 DPA10202-DPB11801 DPA10202-DPB11901 DPA10202-DPB13101 DPA10202-DPB13801; note = HLAs: DPA10202-DPB15501 DPA10202-DPB16501 DPA10301-DPB10101 DPA10301-DPB10201 DPA10301-DPB10202 DPA10301-DPB10401 DPA10301-DPB10402 DPA10301-DPB110501 DPA10301-DPB110601 DPA10301-DPB11301 DPA10301-DPB11801 DPA10301-DPB12301 DPA10301-DPB13901 DPA10301-DPB14001 DPA10301-DPB14901 DPA10301-DPB16501 DPA10301-DPB17501 DPA10301-DPB18001 DPA10401-DPB10101 DPA10401-DPB10201 DPA10401-DPB10202 DPA10401-DPB10402 DPA10401-DPB10501 DPA10401-DPB110501 DPA10401-DPB14901
KEPPVLWIGFELLPDKWTVQ

SEQ ID NO: 7100 - protein, 14 aa, synthetic construct
  source 1..14: note = Seed: PPFLWMGYELHPDK; note = HLAs: DPA10103-DPB10101 DPA10103-DPB10201 DPA10103-DPB10202 DPA10103-DPB10401 DPA10103-DPB112601 DPA10103-DPB11501 DPA10103-DPB11601 DPA10103-DPB11901 DPA10103-DPB12301 DPA10103-DPB13101 DPA10103-DPB13401 DPA10103-DPB13901 DPA10103-DPB14001 DPA10103-DPB14101 DPA10103-DPB14801 DPA10103-DPB15001 DPA10103-DPB15901 DPA10104-DPB10101 DPA10104-DPB11501 DPA10105-DPB10101 DPA10105-DPB10401 DPA10105-DPB15001 DPA10106-DPB10101 DPA10201-DPB10101 DPA10201-DPB110601 DPA10201-DPB11501 DPA10201-DPB11601 DPA10201-DPB11901 DPA10202-DPB10101 DPA10202-DPB10201 DPA10202-DPB10202 DPA10202-DPB10401 DPA10202-DPB110601 DPA10202-DPB11901 DPA10202-DPB13101 DPA10202-DPB16501 DPA10301-DPB10101 DPA10301-DPB10201 DPA10301-DPB10202 DPA10301-DPB10401 DPA10301-DPB10402 DPA10301-DPB110501 DPA10301-DPB110601 DPA10301-DPB11801 DPA10301-DPB12301 DPA10301-DPB13901 DPA10301-DPB14001 DPA10301-DPB14901 DPA10301-DPB15501 DPA10301-DPB16501 DPA10301-DPB17501 DPA10301-DPB18001 DPA10401-DPB10101 DPA10401-DPB10201; note = HLAs: DPA10401-DPB10202 DPA10401-DPB10402 DPA10401-DPB10501 DPA10401-DPB110501 DPA10401-DPB14901
PPYLWWGFELMPDK

SEQ ID NO: 7101 - protein, 20 aa, synthetic construct
  source 1..20: note = Seed: KEPPFLWMGYELHPDKWTVQ; note = HLAs: DRB1_0101 DRB1_1001 DPA10103-DPB10101 DPA10103-DPB10201 DPA10103-DPB10202 DPA10103-DPB10401 DPA10103-DPB10402 DPA10103-DPB10501 DPA10103-DPB110501 DPA10103-DPB112601 DPA10103-DPB11501 DPA10103-DPB11601 DPA10103-DPB11801 DPA10103-DPB11901 DPA10103-DPB12301 DPA10103-DPB13101 DPA10103-DPB13401 DPA10103-DPB13901 DPA10103-DPB14001 DPA10103-DPB14101 DPA10103-DPB14801 DPA10103-DPB14901 DPA10103-DPB15001 DPA10103-DPB15101 DPA10103-DPB15501 DPA10103-DPB15901 DPA10103-DPB18001 DPA10104-DPB10101 DPA10104-DPB11501 DPA10105-DPB10101 DPA10105-DPB10401 DPA10105-DPB11801 DPA10105-DPB15001 DPA10106-DPB10101 DPA10201-DPB10101 DPA10201-DPB10201 DPA10201-DPB10202 DPA10201-DPB10401 DPA10201-DPB10501 DPA10201-DPB110601 DPA10201-DPB11501 DPA10201-DPB11601 DPA10201-DPB11901 DPA10201-DPB13401 DPA10201-DPB15501 DPA10202-DPB10101 DPA10202-DPB10201 DPA10202-DPB10202 DPA10202-DPB10401 DPA10202-DPB10501 DPA10202-DPB110601 DPA10202-DPB11101 DPA10202-DPB11301 DPA10202-DPB11801 DPA10202-DPB11901; note = HLAs: DPA10202-DPB13101 DPA10202-DPB13801 DPA10202-DPB15501 DPA10202-DPB16501 DPA10301-DPB10101 DPA10301-DPB10201 DPA10301-DPB10202 DPA10301-DPB10401 DPA10301-DPB10402 DPA10301-DPB110501 DPA10301-DPB110601 DPA10301-DPB11101 DPA10301-DPB11301 DPA10301-DPB11801 DPA10301-DPB12301 DPA10301-DPB13901 DPA10301-DPB14001 DPA10301-DPB14901 DPA10301-DPB15501 DPA10301-DPB16501 DPA10301-DPB17501 DPA10301-DPB18001 DPA10401-DPB10101 DPA10401-DPB10201 DPA10401-DPB10202 DPA10401-DPB10402 DPA10401-DPB10501 DPA10401-DPB110501 DPA10401-DPB14901
KEPPFLWIGLELIPDKWTVQ

SEQ ID NO: 7102 - protein, 20 aa, synthetic construct
  source 1..20: note = Seed: KEPPFLWMGYELHPDKWTVQ; note = HLAs: DPA10103-DPB10101 DPA10103-DPB10201 DPA10103-DPB10202 DPA10103-DPB10401 DPA10103-DPB10402 DPA10103-DPB10501 DPA10103-DPB110501 DPA10103-DPB112601 DPA10103-DPB11501 DPA10103-DPB11601 DPA10103-DPB11801 DPA10103-DPB11901 DPA10103-DPB12301 DPA10103-DPB13101 DPA10103-DPB13401 DPA10103-DPB13901 DPA10103-DPB14001 DPA10103-DPB14101 DPA10103-DPB14801 DPA10103-DPB14901 DPA10103-DPB15101 DPA10103-DPB15501 DPA10103-DPB15901 DPA10103-DPB18001 DPA10104-DPB10101 DPA10104-DPB11501 DPA10105-DPB10101 DPA10105-DPB10401 DPA10105-DPB11801 DPA10106-DPB10101 DPA10201-DPB10101 DPA10201-DPB10201 DPA10201-DPB10202 DPA10201-DPB10401 DPA10201-DPB10501 DPA10201-DPB110601 DPA10201-DPB11501 DPA10201-DPB11601 DPA10201-DPB11901 DPA10201-DPB13401 DPA10201-DPB15501 DPA10202-DPB10101 DPA10202-DPB10201 DPA10202-DPB10202 DPA10202-DPB10401 DPA10202-DPB10501 DPA10202-DPB110601 DPA10202-DPB11301 DPA10202-DPB11801 DPA10202-DPB11901 DPA10202-DPB13101 DPA10202-DPB13801 DPA10202-DPB15501 DPA10202-DPB16501 DPA10301-DPB10101; note = HLAs: DPA10301-DPB10201 DPA10301-DPB10202 DPA10301-DPB10401 DPA10301-DPB10402 DPA10301-DPB110501 DPA10301-DPB110601 DPA10301-DPB11101 DPA10301-DPB11301 DPA10301-DPB11801 DPA10301-DPB12301 DPA10301-DPB13901 DPA10301-DPB14001 DPA10301-DPB14901 DPA10301-DPB16501 DPA10301-DPB17501 DPA10301-DPB18001 DPA10401-DPB10101 DPA10401-DPB10201 DPA10401-DPB10202 DPA10401-DPB10402 DPA10401-DPB10501 DPA10401-DPB110501 DPA10401-DPB14901
KEPPLLWFGFELLPDKWTVQ

SEQ ID NO: 7103 - protein, 14 aa, synthetic construct
  source 1..14: note = Seed: PPFLWMGYELHPDK; note = HLAs: DPA10103-DPB10101 DPA10103-DPB10201 DPA10103-DPB10202 DPA10103-DPB10401 DPA10103-DPB112601 DPA10103-DPB11501 DPA10103-DPB11601 DPA10103-DPB11901 DPA10103-DPB12301 DPA10103-DPB13101 DPA10103-DPB13401 DPA10103-DPB13901 DPA10103-DPB14001 DPA10103-DPB14101 DPA10103-DPB14801 DPA10103-DPB15001 DPA10103-DPB15901 DPA10104-DPB10101 DPA10104-DPB11501 DPA10105-DPB10101 DPA10105-DPB10401 DPA10105-DPB15001 DPA10106-DPB10101 DPA10201-DPB10101 DPA10201-DPB110601 DPA10201-DPB11501 DPA10201-DPB11601 DPA10201-DPB11901 DPA10202-DPB10101 DPA10202-DPB10201 DPA10202-DPB10202 DPA10202-DPB10401 DPA10202-DPB110601 DPA10202-DPB11901 DPA10202-DPB13101 DPA10202-DPB16501 DPA10301-DPB10101 DPA10301-DPB10201 DPA10301-DPB10202 DPA10301-DPB10401 DPA10301-DPB10402 DPA10301-DPB110501 DPA10301-DPB110601 DPA10301-DPB11801 DPA10301-DPB12301 DPA10301-DPB13901 DPA10301-DPB14001 DPA10301-DPB14901 DPA10301-DPB15501 DPA10301-DPB16501 DPA10301-DPB17501 DPA10301-DPB18001 DPA10401-DPB10101 DPA10401-DPB10201; note = HLAs: DPA10401-DPB10202 DPA10401-DPB10402 DPA10401-DPB10501 DPA10401-DPB110501 DPA10401-DPB14901
PPLLWCGFELVPDK

SEQ ID NO: 7104 - protein, 14 aa, synthetic construct
  source 1..14: note = Seed: PPFLWMGYELHPDK; note = HLAs: DPA10103-DPB10101 DPA10103-DPB10201 DPA10103-DPB10202 DPA10103-DPB10401 DPA10103-DPB112601 DPA10103-DPB11501 DPA10103-DPB11601 DPA10103-DPB11901 DPA10103-DPB12301 DPA10103-DPB13101 DPA10103-DPB13401 DPA10103-DPB13901 DPA10103-DPB14001 DPA10103-DPB14101 DPA10103-DPB14801 DPA10103-DPB15001 DPA10103-DPB15901 DPA10104-DPB10101 DPA10104-DPB11501 DPA10105-DPB10101 DPA10105-DPB10401 DPA10105-DPB15001 DPA10106-DPB10101 DPA10201-DPB10101 DPA10201-DPB110601 DPA10201-DPB11501 DPA10201-DPB11601 DPA10201-DPB11901 DPA10202-DPB10101 DPA10202-DPB10201 DPA10202-DPB10202 DPA10202-DPB10401 DPA10202-DPB110601 DPA10202-DPB11901 DPA10202-DPB13101 DPA10202-DPB16501 DPA10301-DPB10101 DPA10301-DPB10201 DPA10301-DPB10202 DPA10301-DPB10401 DPA10301-DPB10402 DPA10301-DPB110501 DPA10301-DPB110601 DPA10301-DPB11801 DPA10301-DPB12301 DPA10301-DPB13901 DPA10301-DPB14001 DPA10301-DPB14901 DPA10301-DPB15501 DPA10301-DPB16501 DPA10301-DPB17501 DPA10301-DPB18001 DPA10401-DPB10101 DPA10401-DPB10201; note = HLAs: DPA10401-DPB10202 DPA10401-DPB10402 DPA10401-DPB10501 DPA10401-DPB110501 DPA10401-DPB14901
PPYLWEGFELSPDK

SEQ ID NO: 7105 - protein, 20 aa, synthetic construct
  source 1..20: note = Seed: KEPPFLWMGYELHPDKWTVQ; note = HLAs: DPA10103-DPB10101 DPA10103-DPB10201 DPA10103-DPB10202 DPA10103-DPB10401 DPA10103-DPB10402 DPA10103-DPB10501 DPA10103-DPB110501 DPA10103-DPB112601 DPA10103-DPB11501 DPA10103-DPB11601 DPA10103-DPB11801 DPA10103-DPB11901 DPA10103-DPB12301 DPA10103-DPB13101 DPA10103-DPB13401 DPA10103-DPB13901 DPA10103-DPB14001 DPA10103-DPB14101 DPA10103-DPB14801 DPA10103-DPB14901 DPA10103-DPB15001 DPA10103-DPB15101 DPA10103-DPB15501 DPA10103-DPB15901 DPA10103-DPB18001 DPA10104-DPB10101 DPA10104-DPB11501 DPA10105-DPB10101 DPA10105-DPB10401 DPA10105-DPB11801 DPA10105-DPB15001 DPA10106-DPB10101 DPA10201-DPB10101 DPA10201-DPB10201 DPA10201-DPB10202 DPA10201-DPB10401 DPA10201-DPB10501 DPA10201-DPB110601 DPA10201-DPB11501 DPA10201-DPB11601 DPA10201-DPB11901 DPA10201-DPB13401 DPA10201-DPB15501 DPA10202-DPB10101 DPA10202-DPB10201 DPA10202-DPB10202 DPA10202-DPB10401 DPA10202-DPB10501 DPA10202-DPB110601 DPA10202-DPB11101 DPA10202-DPB11301 DPA10202-DPB11801 DPA10202-DPB11901 DPA10202-DPB13101 DPA10202-DPB13801; note = HLAs: DPA10202-DPB15501 DPA10202-DPB16501 DPA10301-DPB10101 DPA10301-DPB10201 DPA10301-DPB10202 DPA10301-DPB10401 DPA10301-DPB10402 DPA10301-DPB110501 DPA10301-DPB110601 DPA10301-DPB11101 DPA10301-DPB11301 DPA10301-DPB11801 DPA10301-DPB12301 DPA10301-DPB13901 DPA10301-DPB14001 DPA10301-DPB14901 DPA10301-DPB15501 DPA10301-DPB16501 DPA10301-DPB17501 DPA10301-DPB18001 DPA10401-DPB10101 DPA10401-DPB10201 DPA10401-DPB10202 DPA10401-DPB10402 DPA10401-DPB10501 DPA10401-DPB110501 DPA10401-DPB14901
KEPPFLWEGFELPPDKWTVQ

SEQ ID NO: 7106 - protein, 20 aa, synthetic construct
  source 1..20: note = Seed: KEPPFLWMGYELHPDKWTVQ; note = HLAs: DRB1_1001 DPA10103-DPB10101 DPA10103-DPB10201 DPA10103-DPB10202 DPA10103-DPB10401 DPA10103-DPB10402 DPA10103-DPB10501 DPA10103-DPB110501 DPA10103-DPB112601 DPA10103-DPB11501 DPA10103-DPB11601 DPA10103-DPB11801 DPA10103-DPB11901 DPA10103-DPB12301 DPA10103-DPB13101 DPA10103-DPB13401 DPA10103-DPB13901 DPA10103-DPB14001 DPA10103-DPB14101 DPA10103-DPB14801 DPA10103-DPB14901 DPA10103-DPB15001 DPA10103-DPB15101 DPA10103-DPB15501 DPA10103-DPB15901 DPA10103-DPB18001 DPA10104-DPB10101 DPA10104-DPB11501 DPA10105-DPB10101 DPA10105-DPB10401 DPA10105-DPB11801 DPA10105-DPB15001 DPA10106-DPB10101 DPA10201-DPB10101 DPA10201-DPB10201 DPA10201-DPB10202 DPA10201-DPB10401 DPA10201-DPB10501 DPA10201-DPB110601 DPA10201-DPB11501 DPA10201-DPB11601 DPA10201-DPB11901 DPA10201-DPB13401 DPA10201-DPB15501 DPA10202-DPB10101 DPA10202-DPB10201 DPA10202-DPB10202 DPA10202-DPB10401 DPA10202-DPB10501 DPA10202-DPB110601 DPA10202-DPB11101 DPA10202-DPB11301 DPA10202-DPB11801 DPA10202-DPB11901 DPA10202-DPB13101; note = HLAs: DPA10202-DPB13801 DPA10202-DPB15501 DPA10202-DPB16501 DPA10301-DPB10101 DPA10301-DPB10201 DPA10301-DPB10202 DPA10301-DPB10401 DPA10301-DPB10402 DPA10301-DPB110501 DPA10301-DPB110601 DPA10301-DPB11101 DPA10301-DPB11301 DPA10301-DPB11801 DPA10301-DPB12301 DPA10301-DPB13901 DPA10301-DPB14001 DPA10301-DPB14901 DPA10301-DPB15501 DPA10301-DPB16501 DPA10301-DPB17501 DPA10301-DPB18001 DPA10401-DPB10101 DPA10401-DPB10201 DPA10401-DPB10202 DPA10401-DPB10402 DPA10401-DPB10501 DPA10401-DPB110501 DPA10401-DPB14901
KEPPYLWVGFELEPDKWTVQ

SEQ ID NO: 7107 - protein, 14 aa, synthetic construct
  source 1..14: note = Seed: PPFLWMGYELHPDK; note = HLAs: DRB1_1001 DPA10103-DPB10101 DPA10103-DPB10201 DPA10103-DPB10202 DPA10103-DPB10401 DPA10103-DPB112601 DPA10103-DPB11501 DPA10103-DPB11601 DPA10103-DPB11901 DPA10103-DPB12301 DPA10103-DPB13101 DPA10103-DPB13401 DPA10103-DPB13901 DPA10103-DPB14001 DPA10103-DPB14101 DPA10103-DPB14801 DPA10103-DPB15001 DPA10103-DPB15901 DPA10104-DPB10101 DPA10104-DPB11501 DPA10105-DPB10101 DPA10105-DPB10401 DPA10105-DPB15001 DPA10106-DPB10101 DPA10201-DPB10101 DPA10201-DPB110601 DPA10201-DPB11501 DPA10201-DPB11601 DPA10201-DPB11901 DPA10202-DPB10101 DPA10202-DPB10201 DPA10202-DPB10202 DPA10202-DPB10401 DPA10202-DPB110601 DPA10202-DPB11901 DPA10202-DPB13101 DPA10202-DPB16501 DPA10301-DPB10101 DPA10301-DPB10201 DPA10301-DPB10202 DPA10301-DPB10401 DPA10301-DPB10402 DPA10301-DPB110501 DPA10301-DPB110601 DPA10301-DPB11801 DPA10301-DPB12301 DPA10301-DPB13901 DPA10301-DPB14001 DPA10301-DPB14901 DPA10301-DPB15501 DPA10301-DPB16501 DPA10301-DPB17501 DPA10301-DPB18001 DPA10401-DPB10101 DPA10401-DPB10201; note = HLAs: DPA10401-DPB10202 DPA10401-DPB10402 DPA10401-DPB10501 DPA10401-DPB110501 DPA10401-DPB14901
PPFLWIGWELAPDK

SEQ ID NO: 7108 - protein, 20 aa, synthetic construct
  source 1..20: note = Seed: KEPPFLWMGYELHPDKWTVQ; note = HLAs: DPA10103-DPB10101 DPA10103-DPB10201 DPA10103-DPB10202 DPA10103-DPB10401 DPA10103-DPB10402 DPA10103-DPB10501 DPA10103-DPB110501 DPA10103-DPB112601 DPA10103-DPB11501 DPA10103-DPB11601 DPA10103-DPB11801 DPA10103-DPB11901 DPA10103-DPB12301 DPA10103-DPB13101 DPA10103-DPB13401 DPA10103-DPB13901 DPA10103-DPB14001 DPA10103-DPB14101 DPA10103-DPB14801 DPA10103-DPB14901 DPA10103-DPB15001 DPA10103-DPB15101 DPA10103-DPB15501 DPA10103-DPB15901 DPA10103-DPB18001 DPA10104-DPB10101 DPA10104-DPB11501 DPA10105-DPB10101 DPA10105-DPB10401 DPA10105-DPB11801 DPA10105-DPB15001 DPA10106-DPB10101 DPA10201-DPB10101 DPA10201-DPB10201 DPA10201-DPB10202 DPA10201-DPB10401 DPA10201-DPB10501 DPA10201-DPB110601 DPA10201-DPB11501 DPA10201-DPB11601 DPA10201-DPB11901 DPA10201-DPB13401 DPA10201-DPB15501 DPA10202-DPB10101 DPA10202-DPB10201 DPA10202-DPB10202 DPA10202-DPB10401 DPA10202-DPB10501 DPA10202-DPB110601 DPA10202-DPB11301 DPA10202-DPB11801 DPA10202-DPB11901 DPA10202-DPB13101 DPA10202-DPB13801 DPA10202-DPB15501; note = HLAs: DPA10202-DPB16501 DPA10301-DPB10101 DPA10301-DPB10201 DPA10301-DPB10202 DPA10301-DPB10401 DPA10301-DPB10402 DPA10301-DPB110501 DPA10301-DPB110601 DPA10301-DPB11101 DPA10301-DPB11301 DPA10301-DPB11801 DPA10301-DPB12301 DPA10301-DPB13901 DPA10301-DPB14001 DPA10301-DPB14901 DPA10301-DPB15501 DPA10301-DPB16501 DPA10301-DPB17501 DPA10301-DPB18001 DPA10401-DPB10101 DPA10401-DPB10201 DPA10401-DPB10202 DPA10401-DPB10402 DPA10401-DPB10501 DPA10401-DPB110501 DPA10401-DPB14901
KEPPFLWEGWELFPDKWTVQ

SEQ ID NO: 7109 - protein, 14 aa, synthetic construct
  source 1..14: note = Seed: PPFLWMGYELHPDK; note = HLAs: DPA10103-DPB10101 DPA10103-DPB10201 DPA10103-DPB10202 DPA10103-DPB10401 DPA10103-DPB112601 DPA10103-DPB11501 DPA10103-DPB11601 DPA10103-DPB11901 DPA10103-DPB12301 DPA10103-DPB13101 DPA10103-DPB13401 DPA10103-DPB13901 DPA10103-DPB14001 DPA10103-DPB14101 DPA10103-DPB14801 DPA10103-DPB15001 DPA10103-DPB15901 DPA10104-DPB10101 DPA10104-DPB11501 DPA10105-DPB10101 DPA10105-DPB10401 DPA10105-DPB15001 DPA10106-DPB10101 DPA10201-DPB10101 DPA10201-DPB110601 DPA10201-DPB11501 DPA10201-DPB11601 DPA10201-DPB11901 DPA10202-DPB10101 DPA10202-DPB10201 DPA10202-DPB10202 DPA10202-DPB10401 DPA10202-DPB110601 DPA10202-DPB11901 DPA10202-DPB13101 DPA10202-DPB16501 DPA10301-DPB10101 DPA10301-DPB10201 DPA10301-DPB10202 DPA10301-DPB10401 DPA10301-DPB10402 DPA10301-DPB110501 DPA10301-DPB110601 DPA10301-DPB11801 DPA10301-DPB12301 DPA10301-DPB13901 DPA10301-DPB14001 DPA10301-DPB14901 DPA10301-DPB15501 DPA10301-DPB16501 DPA10301-DPB17501 DPA10301-DPB18001 DPA10401-DPB10101 DPA10401-DPB10201; note = HLAs: DPA10401-DPB10202 DPA10401-DPB10402 DPA10401-DPB10501 DPA10401-DPB110501 DPA10401-DPB14901
PPFLWSGYELSPDK

SEQ ID NO: 7110 - protein, 14 aa, synthetic construct
  source 1..14: note = Seed: PPFLWMGYELHPDK; note = HLAs: DRB1_1001 DPA10103-DPB10101 DPA10103-DPB10201 DPA10103-DPB10202 DPA10103-DPB10401 DPA10103-DPB112601 DPA10103-DPB11501 DPA10103-DPB11601 DPA10103-DPB11901 DPA10103-DPB12301 DPA10103-DPB13101 DPA10103-DPB13401 DPA10103-DPB13901 DPA10103-DPB14001 DPA10103-DPB14101 DPA10103-DPB14801 DPA10103-DPB15001 DPA10103-DPB15901 DPA10104-DPB10101 DPA10104-DPB11501 DPA10105-DPB10101 DPA10105-DPB10401 DPA10105-DPB15001 DPA10106-DPB10101 DPA10201-DPB10101 DPA10201-DPB110601 DPA10201-DPB11501 DPA10201-DPB11601 DPA10201-DPB11901 DPA10202-DPB10101 DPA10202-DPB10201 DPA10202-DPB10202 DPA10202-DPB10401 DPA10202-DPB110601 DPA10202-DPB11901 DPA10202-DPB13101 DPA10202-DPB16501 DPA10301-DPB10101 DPA10301-DPB10201 DPA10301-DPB10202 DPA10301-DPB10401 DPA10301-DPB10402 DPA10301-DPB110501 DPA10301-DPB110601 DPA10301-DPB11801 DPA10301-DPB12301 DPA10301-DPB13901 DPA10301-DPB14001 DPA10301-DPB14901 DPA10301-DPB15501 DPA10301-DPB16501 DPA10301-DPB17501 DPA10301-DPB18001 DPA10401-DPB10101 DPA10401-DPB10201; note = HLAs: DPA10401-DPB10202 DPA10401-DPB10402 DPA10401-DPB10501 DPA10401-DPB110501 DPA10401-DPB14901
PPYLWAGWELLPDK

SEQ ID NO: 7111 - protein, 14 aa, synthetic construct
  source 1..14: note = Seed: PPFLWMGYELHPDK; note = HLAs: DPA10103-DPB10101 DPA10103-DPB10201 DPA10103-DPB10202 DPA10103-DPB10401 DPA10103-DPB112601 DPA10103-DPB11501 DPA10103-DPB11601 DPA10103-DPB11901 DPA10103-DPB12301 DPA10103-DPB13101 DPA10103-DPB13401 DPA10103-DPB13901 DPA10103-DPB14001 DPA10103-DPB14101 DPA10103-DPB14801 DPA10103-DPB15001 DPA10103-DPB15901 DPA10104-DPB10101 DPA10104-DPB11501 DPA10105-DPB10101 DPA10105-DPB10401 DPA10105-DPB15001 DPA10106-DPB10101 DPA10201-DPB10101 DPA10201-DPB110601 DPA10201-DPB11501 DPA10201-DPB11601 DPA10201-DPB11901 DPA10202-DPB10101 DPA10202-DPB10201 DPA10202-DPB10202 DPA10202-DPB10401 DPA10202-DPB110601 DPA10202-DPB11901 DPA10202-DPB13101 DPA10202-DPB16501 DPA10301-DPB10101 DPA10301-DPB10201 DPA10301-DPB10202 DPA10301-DPB10401 DPA10301-DPB10402 DPA10301-DPB110501 DPA10301-DPB110601 DPA10301-DPB11801 DPA10301-DPB12301 DPA10301-DPB13901 DPA10301-DPB14001 DPA10301-DPB14901 DPA10301-DPB15501 DPA10301-DPB16501 DPA10301-DPB17501 DPA10301-DPB18001 DPA10401-DPB10101 DPA10401-DPB10201; note = HLAs: DPA10401-DPB10202 DPA10401-DPB10402 DPA10401-DPB10501 DPA10401-DPB110501 DPA10401-DPB14901
PPFLWEGYELAPDK

SEQ ID NO: 7112 - protein, 14 aa, synthetic construct
  source 1..14: note = Seed: PPFLWMGYELHPDK; note = HLAs: DPA10103-DPB10101 DPA10103-DPB10201 DPA10103-DPB10202 DPA10103-DPB10401 DPA10103-DPB112601 DPA10103-DPB11501 DPA10103-DPB11601 DPA10103-DPB11901 DPA10103-DPB12301 DPA10103-DPB13101 DPA10103-DPB13401 DPA10103-DPB13901 DPA10103-DPB14001 DPA10103-DPB14101 DPA10103-DPB14801 DPA10103-DPB15001 DPA10103-DPB15901 DPA10104-DPB10101 DPA10104-DPB11501 DPA10105-DPB10101 DPA10105-DPB10401 DPA10105-DPB15001 DPA10106-DPB10101 DPA10201-DPB10101 DPA10201-DPB110601 DPA10201-DPB11501 DPA10201-DPB11601 DPA10201-DPB11901 DPA10202-DPB10101 DPA10202-DPB10201 DPA10202-DPB10202 DPA10202-DPB10401 DPA10202-DPB110601 DPA10202-DPB11901 DPA10202-DPB13101 DPA10202-DPB16501 DPA10301-DPB10101 DPA10301-DPB10201 DPA10301-DPB10202 DPA10301-DPB10401 DPA10301-DPB10402 DPA10301-DPB110501 DPA10301-DPB110601 DPA10301-DPB11801 DPA10301-DPB12301 DPA10301-DPB13901 DPA10301-DPB14001 DPA10301-DPB14901 DPA10301-DPB15501 DPA10301-DPB16501 DPA10301-DPB17501 DPA10301-DPB18001 DPA10401-DPB10101 DPA10401-DPB10201; note = HLAs: DPA10401-DPB10202 DPA10401-DPB10402 DPA10401-DPB10501 DPA10401-DPB110501 DPA10401-DPB14901
PPILWGGFELLPDK

SEQ ID NO: 7113 - protein, 20 aa, synthetic construct
  source 1..20: note = Seed: KEPPFLWMGYELHPDKWTVQ; note = HLAs: DPA10103-DPB10101 DPA10103-DPB10201 DPA10103-DPB10202 DPA10103-DPB10401 DPA10103-DPB10402 DPA10103-DPB10501 DPA10103-DPB110501 DPA10103-DPB112601 DPA10103-DPB11501 DPA10103-DPB11601 DPA10103-DPB11801 DPA10103-DPB11901 DPA10103-DPB12301 DPA10103-DPB13101 DPA10103-DPB13401 DPA10103-DPB13901 DPA10103-DPB14001 DPA10103-DPB14101 DPA10103-DPB14801 DPA10103-DPB14901 DPA10103-DPB15001 DPA10103-DPB15101 DPA10103-DPB15501 DPA10103-DPB15901 DPA10103-DPB18001 DPA10104-DPB10101 DPA10104-DPB11501 DPA10105-DPB10101 DPA10105-DPB10401 DPA10105-DPB11801 DPA10105-DPB15001 DPA10106-DPB10101 DPA10201-DPB10101 DPA10201-DPB10201 DPA10201-DPB10202 DPA10201-DPB10401 DPA10201-DPB10501 DPA10201-DPB110601 DPA10201-DPB11501 DPA10201-DPB11601 DPA10201-DPB11901 DPA10201-DPB13401 DPA10201-DPB15501 DPA10202-DPB10101 DPA10202-DPB10201 DPA10202-DPB10202 DPA10202-DPB10401 DPA10202-DPB10501 DPA10202-DPB110601 DPA10202-DPB11101 DPA10202-DPB11301 DPA10202-DPB11801 DPA10202-DPB11901 DPA10202-DPB13101 DPA10202-DPB13801; note = HLAs: DPA10202-DPB15501 DPA10202-DPB16501 DPA10301-DPB10101 DPA10301-DPB10201 DPA10301-DPB10202 DPA10301-DPB10401 DPA10301-DPB10402 DPA10301-DPB110501 DPA10301-DPB110601 DPA10301-DPB11101 DPA10301-DPB11301 DPA10301-DPB11801 DPA10301-DPB12301 DPA10301-DPB13901 DPA10301-DPB14001 DPA10301-DPB14901 DPA10301-DPB15501 DPA10301-DPB16501 DPA10301-DPB17501 DPA10301-DPB18001 DPA10401-DPB10101 DPA10401-DPB10201 DPA10401-DPB10202 DPA10401-DPB10402 DPA10401-DPB10501 DPA10401-DPB110501 DPA10401-DPB14901
KEPPMLWVGFELMPDKWTVQ

SEQ ID NO: 7114 - protein, 20 aa, synthetic construct
  source 1..20: note = Seed: KEPPFLWMGYELHPDKWTVQ; note = HLAs: DRB1_1001 DPA10103-DPB10101 DPA10103-DPB10201 DPA10103-DPB10202 DPA10103-DPB10401 DPA10103-DPB10402 DPA10103-DPB10501 DPA10103-DPB110501 DPA10103-DPB112601 DPA10103-DPB11501 DPA10103-DPB11601 DPA10103-DPB11801 DPA10103-DPB11901 DPA10103-DPB12301 DPA10103-DPB13101 DPA10103-DPB13401 DPA10103-DPB13901 DPA10103-DPB14001 DPA10103-DPB14101 DPA10103-DPB14801 DPA10103-DPB14901 DPA10103-DPB15001 DPA10103-DPB15101 DPA10103-DPB15501 DPA10103-DPB15901 DPA10103-DPB18001 DPA10104-DPB10101 DPA10104-DPB11501 DPA10105-DPB10101 DPA10105-DPB10401 DPA10105-DPB11801 DPA10105-DPB15001 DPA10106-DPB10101 DPA10201-DPB10101 DPA10201-DPB10201 DPA10201-DPB10202 DPA10201-DPB10401 DPA10201-DPB10501 DPA10201-DPB110601 DPA10201-DPB11501 DPA10201-DPB11601 DPA10201-DPB11901 DPA10201-DPB13401 DPA10201-DPB15501 DPA10202-DPB10101 DPA10202-DPB10201 DPA10202-DPB10202 DPA10202-DPB10401 DPA10202-DPB10501 DPA10202-DPB110601 DPA10202-DPB11101 DPA10202-DPB11301 DPA10202-DPB11801 DPA10202-DPB11901 DPA10202-DPB13101; note = HLAs: DPA10202-DPB13801 DPA10202-DPB15501 DPA10202-DPB16501 DPA10301-DPB10101 DPA10301-DPB10201 DPA10301-DPB10202 DPA10301-DPB10401 DPA10301-DPB10402 DPA10301-DPB110501 DPA10301-DPB110601 DPA10301-DPB11101 DPA10301-DPB11301 DPA10301-DPB11801 DPA10301-DPB12301 DPA10301-DPB13901 DPA10301-DPB14001 DPA10301-DPB14901 DPA10301-DPB15501 DPA10301-DPB16501 DPA10301-DPB17501 DPA10301-DPB18001 DPA10401-DPB10101 DPA10401-DPB10201 DPA10401-DPB10202 DPA10401-DPB10402 DPA10401-DPB10501 DPA10401-DPB110501 DPA10401-DPB14901
KEPPFLWNGYELFPDKWTVQ

SEQ ID NO: 7115 - protein, 14 aa, synthetic construct
  source 1..14: note = Seed: PPFLWMGYELHPDK; note = HLAs: DRB1_1001 DPA10103-DPB10101 DPA10103-DPB10201 DPA10103-DPB10202 DPA10103-DPB10401 DPA10103-DPB112601 DPA10103-DPB11501 DPA10103-DPB11601 DPA10103-DPB11901 DPA10103-DPB12301 DPA10103-DPB13101 DPA10103-DPB13401 DPA10103-DPB13901 DPA10103-DPB14001 DPA10103-DPB14101 DPA10103-DPB14801 DPA10103-DPB15001 DPA10103-DPB15901 DPA10104-DPB10101 DPA10104-DPB11501 DPA10105-DPB10101 DPA10105-DPB10401 DPA10105-DPB15001 DPA10106-DPB10101 DPA10201-DPB10101 DPA10201-DPB110601 DPA10201-DPB11501 DPA10201-DPB11601 DPA10201-DPB11901 DPA10202-DPB10101 DPA10202-DPB10201 DPA10202-DPB10202 DPA10202-DPB10401 DPA10202-DPB110601 DPA10202-DPB11901 DPA10202-DPB13101 DPA10202-DPB16501 DPA10301-DPB10101 DPA10301-DPB10201 DPA10301-DPB10202 DPA10301-DPB10401 DPA10301-DPB10402 DPA10301-DPB110501 DPA10301-DPB110601 DPA10301-DPB11801 DPA10301-DPB12301 DPA10301-DPB13901 DPA10301-DPB14001 DPA10301-DPB14901 DPA10301-DPB15501 DPA10301-DPB16501 DPA10301-DPB17501 DPA10301-DPB18001 DPA10401-DPB10101 DPA10401-DPB10201; note = HLAs: DPA10401-DPB10202 DPA10401-DPB10402 DPA10401-DPB10501 DPA10401-DPB110501 DPA10401-DPB14901
PPYLWAGFELNPDK

SEQ ID NO: 7116 - protein, 20 aa, synthetic construct
  source 1..20: note = Seed: KEPPFLWMGYELHPDKWTVQ; note = HLAs: DPA10103-DPB10101 DPA10103-DPB10201 DPA10103-DPB10202 DPA10103-DPB10401 DPA10103-DPB10402 DPA10103-DPB10501 DPA10103-DPB110501 DPA10103-DPB112601 DPA10103-DPB11501 DPA10103-DPB11601 DPA10103-DPB11801 DPA10103-DPB11901 DPA10103-DPB12301 DPA10103-DPB13101 DPA10103-DPB13401 DPA10103-DPB13901 DPA10103-DPB14001 DPA10103-DPB14101 DPA10103-DPB14801 DPA10103-DPB14901 DPA10103-DPB15001 DPA10103-DPB15101 DPA10103-DPB15501 DPA10103-DPB15901 DPA10103-DPB18001 DPA10104-DPB10101 DPA10104-DPB11501 DPA10105-DPB10101 DPA10105-DPB10401 DPA10105-DPB11801 DPA10105-DPB15001 DPA10106-DPB10101 DPA10201-DPB10101 DPA10201-DPB10201 DPA10201-DPB10202 DPA10201-DPB10401 DPA10201-DPB10501 DPA10201-DPB110601 DPA10201-DPB11501 DPA10201-DPB11601 DPA10201-DPB11901 DPA10201-DPB13401 DPA10201-DPB15501 DPA10202-DPB10101 DPA10202-DPB10201 DPA10202-DPB10202 DPA10202-DPB10401 DPA10202-DPB10501 DPA10202-DPB110601 DPA10202-DPB11301 DPA10202-DPB11801 DPA10202-DPB11901 DPA10202-DPB13101 DPA10202-DPB13801 DPA10202-DPB15501; note = HLAs: DPA10202-DPB16501 DPA10301-DPB10101 DPA10301-DPB10201 DPA10301-DPB10202 DPA10301-DPB10401 DPA10301-DPB10402 DPA10301-DPB110501 DPA10301-DPB110601 DPA10301-DPB11101 DPA10301-DPB11301 DPA10301-DPB11801 DPA10301-DPB12301 DPA10301-DPB13901 DPA10301-DPB14001 DPA10301-DPB14901 DPA10301-DPB15501 DPA10301-DPB16501 DPA10301-DPB17501 DPA10301-DPB18001 DPA10401-DPB10101 DPA10401-DPB10201 DPA10401-DPB10202 DPA10401-DPB10402 DPA10401-DPB10501 DPA10401-DPB110501 DPA10401-DPB14901
KEPPFLWHGLELAPDKWTVQ

SEQ ID NO: 7117 - protein, 20 aa, synthetic construct
  source 1..20: note = Seed: KEPPFLWMGYELHPDKWTVQ; note = HLAs: DPA10103-DPB10101 DPA10103-DPB10201 DPA10103-DPB10202 DPA10103-DPB10401 DPA10103-DPB10402 DPA10103-DPB10501 DPA10103-DPB110501 DPA10103-DPB112601 DPA10103-DPB11501 DPA10103-DPB11601 DPA10103-DPB11801 DPA10103-DPB11901 DPA10103-DPB12301 DPA10103-DPB13101 DPA10103-DPB13401 DPA10103-DPB13901 DPA10103-DPB14001 DPA10103-DPB14101 DPA10103-DPB14801 DPA10103-DPB14901 DPA10103-DPB15001 DPA10103-DPB15101 DPA10103-DPB15501 DPA10103-DPB15901 DPA10103-DPB18001 DPA10104-DPB10101 DPA10104-DPB11501 DPA10105-DPB10101 DPA10105-DPB10401 DPA10105-DPB11801 DPA10105-DPB15001 DPA10106-DPB10101 DPA10201-DPB10101 DPA10201-DPB10201 DPA10201-DPB10202 DPA10201-DPB10401 DPA10201-DPB10501 DPA10201-DPB110601 DPA10201-DPB11501 DPA10201-DPB11601 DPA10201-DPB11901 DPA10201-DPB13401 DPA10201-DPB15501 DPA10202-DPB10101 DPA10202-DPB10201 DPA10202-DPB10202 DPA10202-DPB10401 DPA10202-DPB10501 DPA10202-DPB110601 DPA10202-DPB11101 DPA10202-DPB11301 DPA10202-DPB11801 DPA10202-DPB11901 DPA10202-DPB13101 DPA10202-DPB13801; note = HLAs: DPA10202-DPB15501 DPA10202-DPB16501 DPA10301-DPB10101 DPA10301-DPB10201 DPA10301-DPB10202 DPA10301-DPB10401 DPA10301-DPB10402 DPA10301-DPB110501 DPA10301-DPB110601 DPA10301-DPB11101 DPA10301-DPB11301 DPA10301-DPB11801 DPA10301-DPB12301 DPA10301-DPB13901 DPA10301-DPB14001 DPA10301-DPB14901 DPA10301-DPB15501 DPA10301-DPB16501 DPA10301-DPB17501 DPA10301-DPB18001 DPA10401-DPB10101 DPA10401-DPB10201 DPA10401-DPB10202 DPA10401-DPB10402 DPA10401-DPB10501 DPA10401-DPB110501 DPA10401-DPB14901
KEPPMLWIGFELMPDKWTVQ

SEQ ID NO: 7118 - protein, 14 aa, synthetic construct
  source 1..14: note = Seed: PPFLWMGYELHPDK; note = HLAs: DPA10103-DPB10101 DPA10103-DPB10201 DPA10103-DPB10202 DPA10103-DPB10401 DPA10103-DPB112601 DPA10103-DPB11501 DPA10103-DPB11601 DPA10103-DPB11901 DPA10103-DPB12301 DPA10103-DPB13101 DPA10103-DPB13401 DPA10103-DPB13901 DPA10103-DPB14001 DPA10103-DPB14101 DPA10103-DPB14801 DPA10103-DPB15001 DPA10103-DPB15901 DPA10104-DPB10101 DPA10104-DPB11501 DPA10105-DPB10101 DPA10105-DPB10401 DPA10105-DPB15001 DPA10106-DPB10101 DPA10201-DPB10101 DPA10201-DPB110601 DPA10201-DPB11501 DPA10201-DPB11601 DPA10201-DPB11901 DPA10202-DPB10101 DPA10202-DPB10201 DPA10202-DPB10202 DPA10202-DPB10401 DPA10202-DPB110601 DPA10202-DPB11901 DPA10202-DPB13101 DPA10202-DPB16501 DPA10301-DPB10101 DPA10301-DPB10201 DPA10301-DPB10202 DPA10301-DPB10401 DPA10301-DPB10402 DPA10301-DPB110501 DPA10301-DPB110601 DPA10301-DPB11801 DPA10301-DPB12301 DPA10301-DPB13901 DPA10301-DPB14001 DPA10301-DPB14901 DPA10301-DPB15501 DPA10301-DPB16501 DPA10301-DPB17501 DPA10301-DPB18001 DPA10401-DPB10101 DPA10401-DPB10201; note = HLAs: DPA10401-DPB10202 DPA10401-DPB10402 DPA10401-DPB10501 DPA10401-DPB110501 DPA10401-DPB14901
PPFLWCGFELTPDK

SEQ ID NO: 7119 - protein, 20 aa, synthetic construct
  source 1..20: note = Seed: KEPPFLWMGYELHPDKWTVQ; note = HLAs: DPA10103-DPB10101 DPA10103-DPB10201 DPA10103-DPB10202 DPA10103-DPB10401 DPA10103-DPB10402 DPA10103-DPB10501 DPA10103-DPB110501 DPA10103-DPB112601 DPA10103-DPB11501 DPA10103-DPB11601 DPA10103-DPB11801 DPA10103-DPB11901 DPA10103-DPB12301 DPA10103-DPB13101 DPA10103-DPB13401 DPA10103-DPB13901 DPA10103-DPB14001 DPA10103-DPB14101 DPA10103-DPB14801 DPA10103-DPB14901 DPA10103-DPB15001 DPA10103-DPB15101 DPA10103-DPB15501 DPA10103-DPB15901 DPA10103-DPB18001 DPA10104-DPB10101 DPA10104-DPB11501 DPA10105-DPB10101 DPA10105-DPB10401 DPA10105-DPB11801 DPA10105-DPB15001 DPA10106-DPB10101 DPA10201-DPB10101 DPA10201-DPB10201 DPA10201-DPB10202 DPA10201-DPB10401 DPA10201-DPB10501 DPA10201-DPB110601 DPA10201-DPB11501 DPA10201-DPB11601 DPA10201-DPB11901 DPA10201-DPB13401 DPA10201-DPB15501 DPA10202-DPB10101 DPA10202-DPB10201 DPA10202-DPB10202 DPA10202-DPB10401 DPA10202-DPB10501 DPA10202-DPB110601 DPA10202-DPB11101 DPA10202-DPB11301 DPA10202-DPB11801 DPA10202-DPB11901 DPA10202-DPB13101 DPA10202-DPB13801; note = HLAs: DPA10202-DPB15501 DPA10202-DPB16501 DPA10301-DPB10101 DPA10301-DPB10201 DPA10301-DPB10202 DPA10301-DPB10401 DPA10301-DPB10402 DPA10301-DPB110501 DPA10301-DPB110601 DPA10301-DPB11101 DPA10301-DPB11301 DPA10301-DPB11801 DPA10301-DPB12301 DPA10301-DPB13901 DPA10301-DPB14001 DPA10301-DPB14901 DPA10301-DPB15501 DPA10301-DPB16501 DPA10301-DPB17501 DPA10301-DPB18001 DPA10401-DPB10101 DPA10401-DPB10201 DPA10401-DPB10202 DPA10401-DPB10402 DPA10401-DPB10501 DPA10401-DPB110501 DPA10401-DPB14901
KEPPLLWDGFELIPDKWTVQ

SEQ ID NO: 7120 - protein, 14 aa, synthetic construct
  source 1..14: note = Seed: PPFLWMGYELHPDK; note = HLAs: DPA10103-DPB10101 DPA10103-DPB10201 DPA10103-DPB10202 DPA10103-DPB10401 DPA10103-DPB112601 DPA10103-DPB11501 DPA10103-DPB11601 DPA10103-DPB11901 DPA10103-DPB12301 DPA10103-DPB13101 DPA10103-DPB13401 DPA10103-DPB13901 DPA10103-DPB14001 DPA10103-DPB14101 DPA10103-DPB14801 DPA10103-DPB15001 DPA10103-DPB15901 DPA10104-DPB10101 DPA10104-DPB11501 DPA10105-DPB10101 DPA10105-DPB10401 DPA10105-DPB15001 DPA10106-DPB10101 DPA10201-DPB10101 DPA10201-DPB110601 DPA10201-DPB11501 DPA10201-DPB11601 DPA10201-DPB11901 DPA10202-DPB10101 DPA10202-DPB10201 DPA10202-DPB10202 DPA10202-DPB10401 DPA10202-DPB110601 DPA10202-DPB11901 DPA10202-DPB13101 DPA10202-DPB16501 DPA10301-DPB10101 DPA10301-DPB10201 DPA10301-DPB10202 DPA10301-DPB10401 DPA10301-DPB10402 DPA10301-DPB110501 DPA10301-DPB110601 DPA10301-DPB11801 DPA10301-DPB12301 DPA10301-DPB13901 DPA10301-DPB14001 DPA10301-DPB14901 DPA10301-DPB15501 DPA10301-DPB16501 DPA10301-DPB17501 DPA10301-DPB18001 DPA10401-DPB10101 DPA10401-DPB10201; note = HLAs: DPA10401-DPB10202 DPA10401-DPB10402 DPA10401-DPB10501 DPA10401-DPB110501 DPA10401-DPB14901
PPYLWEGYELIPDK

SEQ ID NO: 7121 - protein, 14 aa, synthetic construct
  source 1..14: note = Seed: PPFLWMGYELHPDK; note = HLAs: DPA10103-DPB10101 DPA10103-DPB10201 DPA10103-DPB10202 DPA10103-DPB10401 DPA10103-DPB112601 DPA10103-DPB11501 DPA10103-DPB11601 DPA10103-DPB11901 DPA10103-DPB12301 DPA10103-DPB13101 DPA10103-DPB13401 DPA10103-DPB13901 DPA10103-DPB14001 DPA10103-DPB14101 DPA10103-DPB14801 DPA10103-DPB15001 DPA10103-DPB15901 DPA10104-DPB10101 DPA10104-DPB11501 DPA10105-DPB10101 DPA10105-DPB10401 DPA10105-DPB15001 DPA10106-DPB10101 DPA10201-DPB10101 DPA10201-DPB110601 DPA10201-DPB11501 DPA10201-DPB11601 DPA10201-DPB11901 DPA10202-DPB10101 DPA10202-DPB10201 DPA10202-DPB10202 DPA10202-DPB10401 DPA10202-DPB110601 DPA10202-DPB11901 DPA10202-DPB13101 DPA10202-DPB16501 DPA10301-DPB10101 DPA10301-DPB10201 DPA10301-DPB10202 DPA10301-DPB10401 DPA10301-DPB10402 DPA10301-DPB110501 DPA10301-DPB110601 DPA10301-DPB11801 DPA10301-DPB12301 DPA10301-DPB13901 DPA10301-DPB14001 DPA10301-DPB14901 DPA10301-DPB16501 DPA10301-DPB17501 DPA10301-DPB18001 DPA10401-DPB10101 DPA10401-DPB10201 DPA10401-DPB10202; note = HLAs: DPA10401-DPB10402 DPA10401-DPB10501 DPA10401-DPB110501 DPA10401-DPB14901
PPLLWQGFELAPDK

SEQ ID NO: 7122 - protein, 20 aa, synthetic construct
  source 1..20: note = Seed: KEPPFLWMGYELHPDKWTVQ; note = HLAs: DRB1_0101 DRB1_0405 DRB1_1001 DPA10103-DPB10101 DPA10103-DPB10201 DPA10103-DPB10202 DPA10103-DPB10401 DPA10103-DPB10402 DPA10103-DPB10501 DPA10103-DPB110501 DPA10103-DPB112601 DPA10103-DPB11501 DPA10103-DPB11601 DPA10103-DPB11801 DPA10103-DPB11901 DPA10103-DPB12301 DPA10103-DPB13101 DPA10103-DPB13401 DPA10103-DPB13901 DPA10103-DPB14001 DPA10103-DPB14101 DPA10103-DPB14801 DPA10103-DPB14901 DPA10103-DPB15001 DPA10103-DPB15101 DPA10103-DPB15501 DPA10103-DPB15901 DPA10103-DPB18001 DPA10104-DPB10101 DPA10104-DPB11501 DPA10105-DPB10101 DPA10105-DPB10401 DPA10105-DPB11801 DPA10105-DPB15001 DPA10106-DPB10101 DPA10201-DPB10101 DPA10201-DPB10201 DPA10201-DPB10202 DPA10201-DPB10401 DPA10201-DPB10501 DPA10201-DPB110601 DPA10201-DPB11501 DPA10201-DPB11601 DPA10201-DPB11901 DPA10201-DPB13401 DPA10201-DPB15501 DPA10202-DPB10101 DPA10202-DPB10201 DPA10202-DPB10202 DPA10202-DPB10401 DPA10202-DPB10501 DPA10202-DPB110601 DPA10202-DPB11101 DPA10202-DPB11301 DPA10202-DPB11801 DPA10202-DPB11901; note = HLAs: DPA10202-DPB13101 DPA10202-DPB13801 DPA10202-DPB15501 DPA10202-DPB16501 DPA10301-DPB10101 DPA10301-DPB10201 DPA10301-DPB10202 DPA10301-DPB10401 DPA10301-DPB10402 DPA10301-DPB110501 DPA10301-DPB110601 DPA10301-DPB11101 DPA10301-DPB11301 DPA10301-DPB11801 DPA10301-DPB12301 DPA10301-DPB13901 DPA10301-DPB14001 DPA10301-DPB14901 DPA10301-DPB15501 DPA10301-DPB16501 DPA10301-DPB17501 DPA10301-DPB18001 DPA10401-DPB10201 DPA10401-DPB10202 DPA10401-DPB10402 DPA10401-DPB10501 DPA10401-DPB110501 DPA10401-DPB14901
KEPPFLWMGAELLPDKWTVQ

SEQ ID NO: 7123 - protein, 20 aa, synthetic construct
  source 1..20: note = Seed: KEPPFLWMGYELHPDKWTVQ; note = HLAs: DRB1_0101 DRB1_0405 DRB1_1001 DPA10103-DPB10201 DPA10103-DPB10202 DPA10103-DPB10401 DPA10103-DPB10501 DPA10103-DPB112601 DPA10103-DPB11501 DPA10103-DPB11601 DPA10103-DPB11801 DPA10103-DPB11901 DPA10103-DPB12301 DPA10103-DPB13401 DPA10103-DPB13901 DPA10103-DPB14001 DPA10103-DPB14101 DPA10103-DPB14801 DPA10103-DPB15501 DPA10103-DPB15901 DPA10104-DPB11501 DPA10105-DPB10401 DPA10105-DPB11801 DPA10106-DPB10101 DPA10201-DPB10101 DPA10201-DPB10201 DPA10201-DPB10202 DPA10201-DPB10401 DPA10201-DPB10501 DPA10201-DPB110601 DPA10201-DPB11501 DPA10201-DPB11601 DPA10201-DPB11901 DPA10201-DPB13401 DPA10201-DPB15501 DPA10202-DPB10101 DPA10202-DPB10201 DPA10202-DPB10202 DPA10202-DPB10401 DPA10202-DPB10501 DPA10202-DPB110601 DPA10202-DPB11101 DPA10202-DPB11301 DPA10202-DPB11801 DPA10202-DPB11901 DPA10202-DPB13101 DPA10202-DPB13801 DPA10202-DPB15501 DPA10202-DPB16501 DPA10301-DPB10201 DPA10301-DPB10202 DPA10301-DPB10401 DPA10301-DPB10402 DPA10301-DPB110501 DPA10301-DPB110601 DPA10301-DPB11101; note = HLAs: DPA10301-DPB11301 DPA10301-DPB11801 DPA10301-DPB12301 DPA10301-DPB13901 DPA10301-DPB14001 DPA10301-DPB14901 DPA10301-DPB15501 DPA10301-DPB17501 DPA10301-DPB18001 DPA10401-DPB10201 DPA10401-DPB10202 DPA10401-DPB10402 DPA10401-DPB110501 DPA10401-DPB14901
KEPPFLWWGAELLPDKWTVQ

SEQ ID NO: 7124 - protein, 20 aa, synthetic construct
  source 1..20: note = Seed: KEPPFLWMGYELHPDKWTVQ; note = HLAs: DRB1_1001 DPA10103-DPB10101 DPA10103-DPB10201 DPA10103-DPB10202 DPA10103-DPB10401 DPA10103-DPB10402 DPA10103-DPB10501 DPA10103-DPB110501 DPA10103-DPB112601 DPA10103-DPB11501 DPA10103-DPB11601 DPA10103-DPB11801 DPA10103-DPB11901 DPA10103-DPB12301 DPA10103-DPB13101 DPA10103-DPB13401 DPA10103-DPB13901 DPA10103-DPB14001 DPA10103-DPB14101 DPA10103-DPB14801 DPA10103-DPB14901 DPA10103-DPB15001 DPA10103-DPB15101 DPA10103-DPB15501 DPA10103-DPB15901 DPA10103-DPB18001 DPA10104-DPB10101 DPA10104-DPB11501 DPA10105-DPB10101 DPA10105-DPB10401 DPA10105-DPB11801 DPA10105-DPB15001 DPA10106-DPB10101 DPA10201-DPB10101 DPA10201-DPB10201 DPA10201-DPB10202 DPA10201-DPB10401 DPA10201-DPB10501 DPA10201-DPB110601 DPA10201-DPB11501 DPA10201-DPB11601 DPA10201-DPB11901 DPA10201-DPB13401 DPA10201-DPB15501 DPA10202-DPB10101 DPA10202-DPB10201 DPA10202-DPB10202 DPA10202-DPB10401 DPA10202-DPB10501 DPA10202-DPB110601 DPA10202-DPB11101 DPA10202-DPB11301 DPA10202-DPB11801 DPA10202-DPB11901 DPA10202-DPB13101; note = HLAs: DPA10202-DPB13801 DPA10202-DPB15501 DPA10202-DPB16501 DPA10301-DPB10101 DPA10301-DPB10201 DPA10301-DPB10202 DPA10301-DPB10401 DPA10301-DPB10402 DPA10301-DPB110501 DPA10301-DPB110601 DPA10301-DPB11101 DPA10301-DPB11301 DPA10301-DPB11801 DPA10301-DPB12301 DPA10301-DPB13901 DPA10301-DPB14001 DPA10301-DPB14901 DPA10301-DPB15501 DPA10301-DPB16501 DPA10301-DPB17501 DPA10301-DPB18001 DPA10401-DPB10101 DPA10401-DPB10201 DPA10401-DPB10202 DPA10401-DPB10402 DPA10401-DPB10501 DPA10401-DPB110501 DPA10401-DPB14901
KEPPYLWLGFELFPDKWTVQ

SEQ ID NO: 7125 - protein, 20 aa, synthetic construct
  source 1..20: note = Seed: KEPPFLWMGYELHPDKWTVQ; note = HLAs: DRB1_1001 DPA10103-DPB10101 DPA10103-DPB10201 DPA10103-DPB10202 DPA10103-DPB10401 DPA10103-DPB10402 DPA10103-DPB10501 DPA10103-DPB110501 DPA10103-DPB112601 DPA10103-DPB11501 DPA10103-DPB11601 DPA10103-DPB11801 DPA10103-DPB11901 DPA10103-DPB12301 DPA10103-DPB13101 DPA10103-DPB13401 DPA10103-DPB13901 DPA10103-DPB14001 DPA10103-DPB14101 DPA10103-DPB14801 DPA10103-DPB14901 DPA10103-DPB15001 DPA10103-DPB15101 DPA10103-DPB15501 DPA10103-DPB15901 DPA10103-DPB18001 DPA10104-DPB10101 DPA10104-DPB11501 DPA10105-DPB10101 DPA10105-DPB10401 DPA10105-DPB11801 DPA10105-DPB15001 DPA10106-DPB10101 DPA10201-DPB10101 DPA10201-DPB10201 DPA10201-DPB10202 DPA10201-DPB10401 DPA10201-DPB10501 DPA10201-DPB110601 DPA10201-DPB11501 DPA10201-DPB11601 DPA10201-DPB11901 DPA10201-DPB13401 DPA10201-DPB15501 DPA10202-DPB10101 DPA10202-DPB10201 DPA10202-DPB10202 DPA10202-DPB10401 DPA10202-DPB10501 DPA10202-DPB110601 DPA10202-DPB11101 DPA10202-DPB11301 DPA10202-DPB11801 DPA10202-DPB11901 DPA10202-DPB13101; note = HLAs: DPA10202-DPB13801 DPA10202-DPB15501 DPA10202-DPB16501 DPA10301-DPB10101 DPA10301-DPB10201 DPA10301-DPB10202 DPA10301-DPB10401 DPA10301-DPB10402 DPA10301-DPB110501 DPA10301-DPB110601 DPA10301-DPB11101 DPA10301-DPB11301 DPA10301-DPB11801 DPA10301-DPB12301 DPA10301-DPB13901 DPA10301-DPB14001 DPA10301-DPB14901 DPA10301-DPB15501 DPA10301-DPB16501 DPA10301-DPB17501 DPA10301-DPB18001 DPA10401-DPB10101 DPA10401-DPB10201 DPA10401-DPB10202 DPA10401-DPB10402 DPA10401-DPB10501 DPA10401-DPB110501 DPA10401-DPB14901
KEPPYLWSGFELEPDKWTVQ

SEQ ID NO: 7126 - protein, 20 aa, synthetic construct
  source 1..20: note = Seed: KEPPFLWMGYELHPDKWTVQ; note = HLAs: DRB1_0101 DRB1_1001 DPA10103-DPB10101 DPA10103-DPB10201 DPA10103-DPB10202 DPA10103-DPB10401 DPA10103-DPB10402 DPA10103-DPB10501 DPA10103-DPB110501 DPA10103-DPB112601 DPA10103-DPB11501 DPA10103-DPB11601 DPA10103-DPB11801 DPA10103-DPB11901 DPA10103-DPB12301 DPA10103-DPB13101 DPA10103-DPB13401 DPA10103-DPB13901 DPA10103-DPB14001 DPA10103-DPB14101 DPA10103-DPB14801 DPA10103-DPB14901 DPA10103-DPB15001 DPA10103-DPB15101 DPA10103-DPB15501 DPA10103-DPB15901 DPA10103-DPB18001 DPA10104-DPB10101 DPA10104-DPB11501 DPA10105-DPB10101 DPA10105-DPB10401 DPA10105-DPB11801 DPA10105-DPB15001 DPA10106-DPB10101 DPA10201-DPB10101 DPA10201-DPB10201 DPA10201-DPB10202 DPA10201-DPB10401 DPA10201-DPB10501 DPA10201-DPB110601 DPA10201-DPB11501 DPA10201-DPB11601 DPA10201-DPB11901 DPA10201-DPB13401 DPA10201-DPB15501 DPA10202-DPB10101 DPA10202-DPB10201 DPA10202-DPB10202 DPA10202-DPB10401 DPA10202-DPB10501 DPA10202-DPB110601 DPA10202-DPB11101 DPA10202-DPB11301 DPA10202-DPB11801 DPA10202-DPB11901; note = HLAs: DPA10202-DPB13101 DPA10202-DPB13801 DPA10202-DPB15501 DPA10202-DPB16501 DPA10301-DPB10101 DPA10301-DPB10201 DPA10301-DPB10202 DPA10301-DPB10401 DPA10301-DPB10402 DPA10301-DPB110501 DPA10301-DPB110601 DPA10301-DPB11101 DPA10301-DPB11301 DPA10301-DPB11801 DPA10301-DPB12301 DPA10301-DPB13901 DPA10301-DPB14001 DPA10301-DPB14901 DPA10301-DPB15501 DPA10301-DPB16501 DPA10301-DPB17501 DPA10301-DPB18001 DPA10401-DPB10101 DPA10401-DPB10201 DPA10401-DPB10202 DPA10401-DPB10402 DPA10401-DPB10501 DPA10401-DPB110501 DPA10401-DPB14901
KEPPFLWLGYELAPDKWTVQ

SEQ ID NO: 7127 - protein, 14 aa, synthetic construct
  source 1..14: note = Seed: PPFLWMGYELHPDK; note = HLAs: DPA10103-DPB10101 DPA10103-DPB10201 DPA10103-DPB10202 DPA10103-DPB10401 DPA10103-DPB112601 DPA10103-DPB11501 DPA10103-DPB11601 DPA10103-DPB11901 DPA10103-DPB12301 DPA10103-DPB13101 DPA10103-DPB13401 DPA10103-DPB13901 DPA10103-DPB14001 DPA10103-DPB14101 DPA10103-DPB14801 DPA10103-DPB15001 DPA10103-DPB15901 DPA10104-DPB10101 DPA10104-DPB11501 DPA10105-DPB10101 DPA10105-DPB10401 DPA10105-DPB15001 DPA10106-DPB10101 DPA10201-DPB10101 DPA10201-DPB110601 DPA10201-DPB11501 DPA10201-DPB11601 DPA10201-DPB11901 DPA10202-DPB10101 DPA10202-DPB10201 DPA10202-DPB10202 DPA10202-DPB10401 DPA10202-DPB110601 DPA10202-DPB11901 DPA10202-DPB13101 DPA10202-DPB16501 DPA10301-DPB10101 DPA10301-DPB10201 DPA10301-DPB10202 DPA10301-DPB10401 DPA10301-DPB10402 DPA10301-DPB110501 DPA10301-DPB110601 DPA10301-DPB11801 DPA10301-DPB12301 DPA10301-DPB13901 DPA10301-DPB14001 DPA10301-DPB14901 DPA10301-DPB15501 DPA10301-DPB16501 DPA10301-DPB17501 DPA10301-DPB18001 DPA10401-DPB10101 DPA10401-DPB10201; note = HLAs: DPA10401-DPB10202 DPA10401-DPB10402 DPA10401-DPB10501 DPA10401-DPB110501 DPA10401-DPB14901
PPFLWAGFELCPDK

SEQ ID NO: 7128 - protein, 14 aa, synthetic construct
  source 1..14: note = Seed: PPFLWMGYELHPDK; note = HLAs: DPA10103-DPB10101 DPA10103-DPB10201 DPA10103-DPB10202 DPA10103-DPB10401 DPA10103-DPB112601 DPA10103-DPB11601 DPA10103-DPB11901 DPA10103-DPB12301 DPA10103-DPB13101 DPA10103-DPB13401 DPA10103-DPB13901 DPA10103-DPB14001 DPA10103-DPB14101 DPA10103-DPB14801 DPA10103-DPB15001 DPA10104-DPB10101 DPA10105-DPB10101 DPA10105-DPB10401 DPA10105-DPB15001 DPA10106-DPB10101 DPA10201-DPB10101 DPA10201-DPB110601 DPA10201-DPB11601 DPA10201-DPB11901 DPA10202-DPB10101 DPA10202-DPB10201 DPA10202-DPB10202 DPA10202-DPB110601 DPA10202-DPB11901 DPA10202-DPB13101 DPA10202-DPB16501 DPA10301-DPB10101 DPA10301-DPB10201 DPA10301-DPB10202 DPA10301-DPB110601 DPA10301-DPB15501 DPA10301-DPB16501 DPA10401-DPB10101 DPA10401-DPB10201 DPA10401-DPB10202 DPA10401-DPB10501
PPRLWSGFELLPDK

SEQ ID NO: 7129 - protein, 20 aa, synthetic construct
  source 1..20: note = Seed: KEPPFLWMGYELHPDKWTVQ; note = HLAs: DPA10103-DPB10101 DPA10103-DPB10201 DPA10103-DPB10202 DPA10103-DPB10401 DPA10103-DPB10402 DPA10103-DPB10501 DPA10103-DPB110501 DPA10103-DPB112601 DPA10103-DPB11501 DPA10103-DPB11601 DPA10103-DPB11801 DPA10103-DPB11901 DPA10103-DPB12301 DPA10103-DPB13101 DPA10103-DPB13401 DPA10103-DPB13901 DPA10103-DPB14001 DPA10103-DPB14101 DPA10103-DPB14801 DPA10103-DPB14901 DPA10103-DPB15001 DPA10103-DPB15101 DPA10103-DPB15501 DPA10103-DPB15901 DPA10103-DPB18001 DPA10104-DPB10101 DPA10104-DPB11501 DPA10105-DPB10101 DPA10105-DPB10401 DPA10105-DPB11801 DPA10105-DPB15001 DPA10106-DPB10101 DPA10201-DPB10101 DPA10201-DPB10201 DPA10201-DPB10202 DPA10201-DPB10401 DPA10201-DPB10501 DPA10201-DPB110601 DPA10201-DPB11501 DPA10201-DPB11601 DPA10201-DPB11901 DPA10201-DPB13401 DPA10201-DPB15501 DPA10202-DPB10101 DPA10202-DPB10201 DPA10202-DPB10202 DPA10202-DPB10401 DPA10202-DPB10501 DPA10202-DPB110601 DPA10202-DPB11101 DPA10202-DPB11301 DPA10202-DPB11801 DPA10202-DPB11901 DPA10202-DPB13101 DPA10202-DPB13801; note = HLAs: DPA10202-DPB15501 DPA10202-DPB16501 DPA10301-DPB10101 DPA10301-DPB10201 DPA10301-DPB10202 DPA10301-DPB10401 DPA10301-DPB10402 DPA10301-DPB110501 DPA10301-DPB110601 DPA10301-DPB11101 DPA10301-DPB11301 DPA10301-DPB11801 DPA10301-DPB12301 DPA10301-DPB13901 DPA10301-DPB14001 DPA10301-DPB14901 DPA10301-DPB15501 DPA10301-DPB16501 DPA10301-DPB17501 DPA10301-DPB18001 DPA10401-DPB10101 DPA10401-DPB10201 DPA10401-DPB10202 DPA10401-DPB10402 DPA10401-DPB10501 DPA10401-DPB110501 DPA10401-DPB14901
KEPPLLWHGFELSPDKWTVQ

SEQ ID NO: 7130 - protein, 20 aa, synthetic construct
  source 1..20: note = Seed: KEPPFLWMGYELHPDKWTVQ; note = HLAs: DRB1_0101 DRB1_1001 DPA10103-DPB10101 DPA10103-DPB10201 DPA10103-DPB10202 DPA10103-DPB10401 DPA10103-DPB10402 DPA10103-DPB10501 DPA10103-DPB110501 DPA10103-DPB112601 DPA10103-DPB11501 DPA10103-DPB11601 DPA10103-DPB11801 DPA10103-DPB11901 DPA10103-DPB12301 DPA10103-DPB13101 DPA10103-DPB13401 DPA10103-DPB13901 DPA10103-DPB14001 DPA10103-DPB14101 DPA10103-DPB14801 DPA10103-DPB14901 DPA10103-DPB15001 DPA10103-DPB15101 DPA10103-DPB15501 DPA10103-DPB15901 DPA10103-DPB18001 DPA10104-DPB10101 DPA10104-DPB11501 DPA10105-DPB10101 DPA10105-DPB10401 DPA10105-DPB11801 DPA10105-DPB15001 DPA10106-DPB10101 DPA10201-DPB10101 DPA10201-DPB10201 DPA10201-DPB10202 DPA10201-DPB10401 DPA10201-DPB10501 DPA10201-DPB110601 DPA10201-DPB11501 DPA10201-DPB11601 DPA10201-DPB11901 DPA10201-DPB13401 DPA10201-DPB15501 DPA10202-DPB10101 DPA10202-DPB10201 DPA10202-DPB10202 DPA10202-DPB10401 DPA10202-DPB10501 DPA10202-DPB110601 DPA10202-DPB11101 DPA10202-DPB11301 DPA10202-DPB11801 DPA10202-DPB11901; note = HLAs: DPA10202-DPB13101 DPA10202-DPB13801 DPA10202-DPB15501 DPA10202-DPB16501 DPA10301-DPB10101 DPA10301-DPB10201 DPA10301-DPB10202 DPA10301-DPB10401 DPA10301-DPB10402 DPA10301-DPB110501 DPA10301-DPB110601 DPA10301-DPB11101 DPA10301-DPB11301 DPA10301-DPB11801 DPA10301-DPB12301 DPA10301-DPB13901 DPA10301-DPB14001 DPA10301-DPB14901 DPA10301-DPB15501 DPA10301-DPB16501 DPA10301-DPB17501 DPA10301-DPB18001 DPA10401-DPB10101 DPA10401-DPB10201 DPA10401-DPB10202 DPA10401-DPB10402 DPA10401-DPB10501 DPA10401-DPB110501 DPA10401-DPB14901
KEPPFLWHGVELVPDKWTVQ

SEQ ID NO: 7131 - protein, 20 aa, synthetic construct
  source 1..20: note = Seed: KEPPFLWMGYELHPDKWTVQ; note = HLAs: DPA10103-DPB10201 DPA10103-DPB10202 DPA10103-DPB10401 DPA10103-DPB10402 DPA10103-DPB10501 DPA10103-DPB110501 DPA10103-DPB112601 DPA10103-DPB11501 DPA10103-DPB11601 DPA10103-DPB11801 DPA10103-DPB11901 DPA10103-DPB12301 DPA10103-DPB13401 DPA10103-DPB13901 DPA10103-DPB14001 DPA10103-DPB14101 DPA10103-DPB14801 DPA10103-DPB14901 DPA10103-DPB15101 DPA10103-DPB15901 DPA10103-DPB18001 DPA10104-DPB11501 DPA10105-DPB10401 DPA10105-DPB11801 DPA10106-DPB10101 DPA10201-DPB10101 DPA10201-DPB10201 DPA10201-DPB10202 DPA10201-DPB10401 DPA10201-DPB10501 DPA10201-DPB110601 DPA10201-DPB11501 DPA10201-DPB11601 DPA10201-DPB11901 DPA10201-DPB13401 DPA10201-DPB15501 DPA10202-DPB10201 DPA10202-DPB10202 DPA10202-DPB10501 DPA10202-DPB110601 DPA10202-DPB11301 DPA10202-DPB11801 DPA10202-DPB11901 DPA10202-DPB13101 DPA10202-DPB13801 DPA10202-DPB15501 DPA10202-DPB16501 DPA10301-DPB10101 DPA10301-DPB10201 DPA10301-DPB10202 DPA10301-DPB10401 DPA10301-DPB10402 DPA10301-DPB110501 DPA10301-DPB110601; note = HLAs: DPA10301-DPB11301 DPA10301-DPB11801 DPA10301-DPB12301 DPA10301-DPB13901 DPA10301-DPB14001 DPA10301-DPB14901 DPA10301-DPB17501 DPA10301-DPB18001 DPA10401-DPB10201 DPA10401-DPB10202 DPA10401-DPB10402 DPA10401-DPB110501 DPA10401-DPB14901
KEPPFLWYGLELLPDKWTVQ

SEQ ID NO: 7132 - protein, 20 aa, synthetic construct
  source 1..20: note = Seed: KEPPFLWMGYELHPDKWTVQ; note = HLAs: DRB1_0101 DPA10103-DPB10101 DPA10103-DPB10201 DPA10103-DPB10202 DPA10103-DPB10401 DPA10103-DPB10402 DPA10103-DPB10501 DPA10103-DPB110501 DPA10103-DPB112601 DPA10103-DPB11501 DPA10103-DPB11601 DPA10103-DPB11801 DPA10103-DPB11901 DPA10103-DPB12301 DPA10103-DPB13101 DPA10103-DPB13401 DPA10103-DPB13901 DPA10103-DPB14001 DPA10103-DPB14101 DPA10103-DPB14801 DPA10103-DPB14901 DPA10103-DPB15001 DPA10103-DPB15101 DPA10103-DPB15501 DPA10103-DPB15901 DPA10103-DPB18001 DPA10104-DPB10101 DPA10104-DPB11501 DPA10105-DPB10101 DPA10105-DPB10401 DPA10105-DPB11801 DPA10105-DPB15001 DPA10106-DPB10101 DPA10201-DPB10101 DPA10201-DPB10201 DPA10201-DPB10202 DPA10201-DPB10401 DPA10201-DPB10501 DPA10201-DPB110601 DPA10201-DPB11501 DPA10201-DPB11601 DPA10201-DPB11901 DPA10201-DPB13401 DPA10201-DPB15501 DPA10202-DPB10101 DPA10202-DPB10201 DPA10202-DPB10202 DPA10202-DPB10401 DPA10202-DPB10501 DPA10202-DPB110601 DPA10202-DPB11101 DPA10202-DPB11301 DPA10202-DPB11801 DPA10202-DPB11901 DPA10202-DPB13101; note = HLAs: DPA10202-DPB13801 DPA10202-DPB15501 DPA10202-DPB16501 DPA10301-DPB10101 DPA10301-DPB10201 DPA10301-DPB10202 DPA10301-DPB10401 DPA10301-DPB10402 DPA10301-DPB110501 DPA10301-DPB110601 DPA10301-DPB11101 DPA10301-DPB11301 DPA10301-DPB11801 DPA10301-DPB12301 DPA10301-DPB13901 DPA10301-DPB14001 DPA10301-DPB14901 DPA10301-DPB15501 DPA10301-DPB16501 DPA10301-DPB17501 DPA10301-DPB18001 DPA10401-DPB10101 DPA10401-DPB10201 DPA10401-DPB10202 DPA10401-DPB10402 DPA10401-DPB10501 DPA10401-DPB110501 DPA10401-DPB14901
KEPPFLWSGMELFPDKWTVQ

SEQ ID NO: 7133 - protein, 20 aa, synthetic construct
  source 1..20: note = Seed: KEPPFLWMGYELHPDKWTVQ; note = HLAs: DPA10103-DPB10101 DPA10103-DPB10201 DPA10103-DPB10202 DPA10103-DPB10401 DPA10103-DPB10402 DPA10103-DPB10501 DPA10103-DPB110501 DPA10103-DPB112601 DPA10103-DPB11501 DPA10103-DPB11601 DPA10103-DPB11801 DPA10103-DPB11901 DPA10103-DPB12301 DPA10103-DPB13101 DPA10103-DPB13401 DPA10103-DPB13901 DPA10103-DPB14001 DPA10103-DPB14101 DPA10103-DPB14801 DPA10103-DPB14901 DPA10103-DPB15001 DPA10103-DPB15101 DPA10103-DPB15501 DPA10103-DPB15901 DPA10103-DPB18001 DPA10104-DPB10101 DPA10104-DPB11501 DPA10105-DPB10101 DPA10105-DPB10401 DPA10105-DPB11801 DPA10105-DPB15001 DPA10106-DPB10101 DPA10201-DPB10101 DPA10201-DPB10201 DPA10201-DPB10202 DPA10201-DPB10401 DPA10201-DPB10501 DPA10201-DPB110601 DPA10201-DPB11501 DPA10201-DPB11601 DPA10201-DPB11901 DPA10201-DPB13401 DPA10201-DPB15501 DPA10202-DPB10101 DPA10202-DPB10201 DPA10202-DPB10202 DPA10202-DPB10401 DPA10202-DPB10501 DPA10202-DPB110601 DPA10202-DPB11101 DPA10202-DPB11301 DPA10202-DPB11801 DPA10202-DPB11901 DPA10202-DPB13101 DPA10202-DPB13801; note = HLAs: DPA10202-DPB15501 DPA10202-DPB16501 DPA10301-DPB10101 DPA10301-DPB10201 DPA10301-DPB10202 DPA10301-DPB10401 DPA10301-DPB10402 DPA10301-DPB110501 DPA10301-DPB110601 DPA10301-DPB11101 DPA10301-DPB11801 DPA10301-DPB12301 DPA10301-DPB13901 DPA10301-DPB14001 DPA10301-DPB14901 DPA10301-DPB16501 DPA10301-DPB17501 DPA10301-DPB18001 DPA10401-DPB10101 DPA10401-DPB10201 DPA10401-DPB10202 DPA10401-DPB10402 DPA10401-DPB10501 DPA10401-DPB110501 DPA10401-DPB14901
KEPPLLWVGFELHPDKWTVQ

SEQ ID NO: 7134 - protein, 20 aa, synthetic construct
  source 1..20: note = Seed: KEPPFLWMGYELHPDKWTVQ; note = HLAs: DRB1_0101 DRB1_1001 DPA10103-DPB10101 DPA10103-DPB10201 DPA10103-DPB10202 DPA10103-DPB10401 DPA10103-DPB10402 DPA10103-DPB10501 DPA10103-DPB110501 DPA10103-DPB112601 DPA10103-DPB11501 DPA10103-DPB11601 DPA10103-DPB11801 DPA10103-DPB11901 DPA10103-DPB12301 DPA10103-DPB13101 DPA10103-DPB13401 DPA10103-DPB13901 DPA10103-DPB14001 DPA10103-DPB14101 DPA10103-DPB14801 DPA10103-DPB14901 DPA10103-DPB15001 DPA10103-DPB15101 DPA10103-DPB15501 DPA10103-DPB15901 DPA10103-DPB18001 DPA10104-DPB10101 DPA10104-DPB11501 DPA10105-DPB10101 DPA10105-DPB10401 DPA10105-DPB11801 DPA10105-DPB15001 DPA10106-DPB10101 DPA10201-DPB10101 DPA10201-DPB10201 DPA10201-DPB10202 DPA10201-DPB10401 DPA10201-DPB10501 DPA10201-DPB110601 DPA10201-DPB11501 DPA10201-DPB11601 DPA10201-DPB11901 DPA10201-DPB13401 DPA10201-DPB15501 DPA10202-DPB10101 DPA10202-DPB10201 DPA10202-DPB10202 DPA10202-DPB10401 DPA10202-DPB10501 DPA10202-DPB110601 DPA10202-DPB11101 DPA10202-DPB11301 DPA10202-DPB11801 DPA10202-DPB11901; note = HLAs: DPA10202-DPB13101 DPA10202-DPB13801 DPA10202-DPB15501 DPA10202-DPB16501 DPA10301-DPB10101 DPA10301-DPB10201 DPA10301-DPB10202 DPA10301-DPB10401 DPA10301-DPB10402 DPA10301-DPB110501 DPA10301-DPB110601 DPA10301-DPB11101 DPA10301-DPB11301 DPA10301-DPB11801 DPA10301-DPB12301 DPA10301-DPB13901 DPA10301-DPB14001 DPA10301-DPB14901 DPA10301-DPB15501 DPA10301-DPB16501 DPA10301-DPB17501 DPA10301-DPB18001 DPA10401-DPB10101 DPA10401-DPB10201 DPA10401-DPB10202 DPA10401-DPB10402 DPA10401-DPB10501 DPA10401-DPB110501 DPA10401-DPB14901
KEPPFLWTGLELNPDKWTVQ

SEQ ID NO: 7135 - protein, 20 aa, synthetic construct
  source 1..20: note = Seed: KEPPFLWMGYELHPDKWTVQ; note = HLAs: DRB1_0101 DRB1_0405 DRB1_1001 DPA10103-DPB10201 DPA10103-DPB10202 DPA10103-DPB10401 DPA10103-DPB10402 DPA10103-DPB110501 DPA10103-DPB112601 DPA10103-DPB11501 DPA10103-DPB11801 DPA10103-DPB11901 DPA10103-DPB12301 DPA10103-DPB13401 DPA10103-DPB13901 DPA10103-DPB14001 DPA10103-DPB14101 DPA10103-DPB14801 DPA10103-DPB14901 DPA10103-DPB15101 DPA10103-DPB15501 DPA10103-DPB15901 DPA10103-DPB18001 DPA10104-DPB11501 DPA10105-DPB10401 DPA10105-DPB11801 DPA10106-DPB10101 DPA10201-DPB10101 DPA10201-DPB10201 DPA10201-DPB10202 DPA10201-DPB10401 DPA10201-DPB10501 DPA10201-DPB110601 DPA10201-DPB11501 DPA10201-DPB11601 DPA10201-DPB11901 DPA10201-DPB13401 DPA10201-DPB15501 DPA10202-DPB10101 DPA10202-DPB10201 DPA10202-DPB10202 DPA10202-DPB10401 DPA10202-DPB10501 DPA10202-DPB110601 DPA10202-DPB11101 DPA10202-DPB11301 DPA10202-DPB11801 DPA10202-DPB11901 DPA10202-DPB13101 DPA10202-DPB13801 DPA10202-DPB15501 DPA10202-DPB16501 DPA10301-DPB10101 DPA10301-DPB10201 DPA10301-DPB10202 DPA10301-DPB10401; note = HLAs: DPA10301-DPB10402 DPA10301-DPB110501 DPA10301-DPB110601 DPA10301-DPB11101 DPA10301-DPB11301 DPA10301-DPB11801 DPA10301-DPB12301 DPA10301-DPB13901 DPA10301-DPB14001 DPA10301-DPB14901 DPA10301-DPB15501 DPA10301-DPB16501 DPA10301-DPB17501 DPA10301-DPB18001 DPA10401-DPB10101 DPA10401-DPB10201 DPA10401-DPB10202 DPA10401-DPB10402 DPA10401-DPB10501 DPA10401-DPB110501 DPA10401-DPB14901
KEPPFLWVGVELLPDKWTVQ

SEQ ID NO: 7136 - protein, 20 aa, synthetic construct
  source 1..20: note = Seed: KEPPFLWMGYELHPDKWTVQ; note = HLAs: DPA10103-DPB10101 DPA10103-DPB10201 DPA10103-DPB10202 DPA10103-DPB10401 DPA10103-DPB10402 DPA10103-DPB10501 DPA10103-DPB110501 DPA10103-DPB112601 DPA10103-DPB11501 DPA10103-DPB11601 DPA10103-DPB11801 DPA10103-DPB11901 DPA10103-DPB12301 DPA10103-DPB13101 DPA10103-DPB13401 DPA10103-DPB13901 DPA10103-DPB14001 DPA10103-DPB14101 DPA10103-DPB14801 DPA10103-DPB14901 DPA10103-DPB15001 DPA10103-DPB15101 DPA10103-DPB15501 DPA10103-DPB15901 DPA10103-DPB18001 DPA10104-DPB10101 DPA10104-DPB11501 DPA10105-DPB10101 DPA10105-DPB10401 DPA10105-DPB11801 DPA10105-DPB15001 DPA10106-DPB10101 DPA10201-DPB10101 DPA10201-DPB10201 DPA10201-DPB10202 DPA10201-DPB10401 DPA10201-DPB10501 DPA10201-DPB110601 DPA10201-DPB11501 DPA10201-DPB11601 DPA10201-DPB11901 DPA10201-DPB13401 DPA10201-DPB15501 DPA10202-DPB10101 DPA10202-DPB10201 DPA10202-DPB10202 DPA10202-DPB10401 DPA10202-DPB10501 DPA10202-DPB110601 DPA10202-DPB11301 DPA10202-DPB11801 DPA10202-DPB11901 DPA10202-DPB13101 DPA10202-DPB13801 DPA10202-DPB15501; note = HLAs: DPA10202-DPB16501 DPA10301-DPB10101 DPA10301-DPB10201 DPA10301-DPB10202 DPA10301-DPB10401 DPA10301-DPB10402 DPA10301-DPB110501 DPA10301-DPB110601 DPA10301-DPB11101 DPA10301-DPB11301 DPA10301-DPB11801 DPA10301-DPB12301 DPA10301-DPB13901 DPA10301-DPB14001 DPA10301-DPB14901 DPA10301-DPB15501 DPA10301-DPB16501 DPA10301-DPB17501 DPA10301-DPB18001 DPA10401-DPB10101 DPA10401-DPB10201 DPA10401-DPB10202 DPA10401-DPB10402 DPA10401-DPB10501 DPA10401-DPB110501 DPA10401-DPB14901
KEPPLLWTGLELLPDKWTVQ

SEQ ID NO: 7137 - protein, 14 aa, synthetic construct
  source 1..14: note = Seed: PPFLWMGYELHPDK; note = HLAs: DPA10103-DPB10101 DPA10103-DPB10201 DPA10103-DPB10202 DPA10103-DPB10401 DPA10103-DPB112601 DPA10103-DPB11501 DPA10103-DPB11601 DPA10103-DPB11901 DPA10103-DPB12301 DPA10103-DPB13101 DPA10103-DPB13401 DPA10103-DPB13901 DPA10103-DPB14001 DPA10103-DPB14101 DPA10103-DPB14801 DPA10103-DPB15001 DPA10103-DPB15901 DPA10104-DPB10101 DPA10104-DPB11501 DPA10105-DPB10101 DPA10105-DPB10401 DPA10105-DPB15001 DPA10106-DPB10101 DPA10201-DPB10101 DPA10201-DPB110601 DPA10201-DPB11501 DPA10201-DPB11601 DPA10201-DPB11901 DPA10202-DPB10101 DPA10202-DPB10201 DPA10202-DPB10202 DPA10202-DPB10401 DPA10202-DPB110601 DPA10202-DPB11901 DPA10202-DPB13101 DPA10202-DPB16501 DPA10301-DPB10101 DPA10301-DPB10201 DPA10301-DPB10202 DPA10301-DPB10401 DPA10301-DPB10402 DPA10301-DPB110501 DPA10301-DPB110601 DPA10301-DPB11801 DPA10301-DPB12301 DPA10301-DPB13901 DPA10301-DPB14001 DPA10301-DPB14901 DPA10301-DPB15501 DPA10301-DPB16501 DPA10301-DPB17501 DPA10301-DPB18001 DPA10401-DPB10101 DPA10401-DPB10201; note = HLAs: DPA10401-DPB10202 DPA10401-DPB10402 DPA10401-DPB10501 DPA10401-DPB110501 DPA10401-DPB14901
PPFLWTGYELNPDK

SEQ ID NO: 7138 - protein, 14 aa, synthetic construct
  source 1..14: note = Seed: PPFLWMGYELHPDK; note = HLAs: DPA10103-DPB10101 DPA10103-DPB10201 DPA10103-DPB10202 DPA10103-DPB10401 DPA10103-DPB112601 DPA10103-DPB11501 DPA10103-DPB11601 DPA10103-DPB11901 DPA10103-DPB12301 DPA10103-DPB13101 DPA10103-DPB13401 DPA10103-DPB13901 DPA10103-DPB14001 DPA10103-DPB14101 DPA10103-DPB14801 DPA10103-DPB15001 DPA10103-DPB15901 DPA10104-DPB10101 DPA10104-DPB11501 DPA10105-DPB10101 DPA10105-DPB10401 DPA10105-DPB15001 DPA10106-DPB10101 DPA10201-DPB10101 DPA10201-DPB110601 DPA10201-DPB11501 DPA10201-DPB11601 DPA10201-DPB11901 DPA10202-DPB10101 DPA10202-DPB10201 DPA10202-DPB10202 DPA10202-DPB10401 DPA10202-DPB110601 DPA10202-DPB11901 DPA10202-DPB13101 DPA10202-DPB16501 DPA10301-DPB10201 DPA10301-DPB10202 DPA10301-DPB10401 DPA10301-DPB10402 DPA10301-DPB110501 DPA10301-DPB110601 DPA10301-DPB11801 DPA10301-DPB12301 DPA10301-DPB13901 DPA10301-DPB14001 DPA10301-DPB14901 DPA10301-DPB17501 DPA10301-DPB18001 DPA10401-DPB10201 DPA10401-DPB10202 DPA10401-DPB10402 DPA10401-DPB10501 DPA10401-DPB110501; note = HLAs: DPA10401-DPB14901
PPFLWWGWELLPDK

SEQ ID NO: 7139 - protein, 20 aa, synthetic construct
  source 1..20: note = Seed: KEPPFLWMGYELHPDKWTVQ; note = HLAs: DPA10103-DPB10101 DPA10103-DPB10201 DPA10103-DPB10202 DPA10103-DPB10401 DPA10103-DPB10402 DPA10103-DPB10501 DPA10103-DPB110501 DPA10103-DPB112601 DPA10103-DPB11501 DPA10103-DPB11601 DPA10103-DPB11801 DPA10103-DPB11901 DPA10103-DPB12301 DPA10103-DPB13101 DPA10103-DPB13401 DPA10103-DPB13901 DPA10103-DPB14001 DPA10103-DPB14101 DPA10103-DPB14801 DPA10103-DPB14901 DPA10103-DPB15001 DPA10103-DPB15101 DPA10103-DPB15501 DPA10103-DPB15901 DPA10103-DPB18001 DPA10104-DPB10101 DPA10104-DPB11501 DPA10105-DPB10101 DPA10105-DPB10401 DPA10105-DPB11801 DPA10105-DPB15001 DPA10106-DPB10101 DPA10201-DPB10101 DPA10201-DPB10201 DPA10201-DPB10202 DPA10201-DPB10401 DPA10201-DPB10501 DPA10201-DPB110601 DPA10201-DPB11501 DPA10201-DPB11601 DPA10201-DPB11901 DPA10201-DPB13401 DPA10201-DPB15501 DPA10202-DPB10101 DPA10202-DPB10201 DPA10202-DPB10202 DPA10202-DPB10401 DPA10202-DPB10501 DPA10202-DPB110601 DPA10202-DPB11301 DPA10202-DPB11801 DPA10202-DPB11901 DPA10202-DPB13101 DPA10202-DPB13801 DPA10202-DPB15501; note = HLAs: DPA10202-DPB16501 DPA10301-DPB10101 DPA10301-DPB10201 DPA10301-DPB10202 DPA10301-DPB10401 DPA10301-DPB10402 DPA10301-DPB110501 DPA10301-DPB110601 DPA10301-DPB11301 DPA10301-DPB11801 DPA10301-DPB12301 DPA10301-DPB13901 DPA10301-DPB14001 DPA10301-DPB14901 DPA10301-DPB15501 DPA10301-DPB16501 DPA10301-DPB17501 DPA10301-DPB18001 DPA10401-DPB10101 DPA10401-DPB10201 DPA10401-DPB10202 DPA10401-DPB10402 DPA10401-DPB10501 DPA10401-DPB110501 DPA10401-DPB14901
KEPPWLWWGFELLPDKWTVQ

SEQ ID NO: 7140 - protein, 20 aa, synthetic construct
  source 1..20: note = Seed: KEPPFLWMGYELHPDKWTVQ; note = HLAs: DRB1_0101 DPA10103-DPB10101 DPA10103-DPB10201 DPA10103-DPB10202 DPA10103-DPB10401 DPA10103-DPB10402 DPA10103-DPB10501 DPA10103-DPB110501 DPA10103-DPB112601 DPA10103-DPB11501 DPA10103-DPB11601 DPA10103-DPB11801 DPA10103-DPB11901 DPA10103-DPB12301 DPA10103-DPB13101 DPA10103-DPB13401 DPA10103-DPB13901 DPA10103-DPB14001 DPA10103-DPB14101 DPA10103-DPB14801 DPA10103-DPB14901 DPA10103-DPB15001 DPA10103-DPB15101 DPA10103-DPB15501 DPA10103-DPB15901 DPA10103-DPB18001 DPA10104-DPB10101 DPA10104-DPB11501 DPA10105-DPB10101 DPA10105-DPB10401 DPA10105-DPB11801 DPA10105-DPB15001 DPA10106-DPB10101 DPA10201-DPB10101 DPA10201-DPB10201 DPA10201-DPB10202 DPA10201-DPB10401 DPA10201-DPB10501 DPA10201-DPB110601 DPA10201-DPB11501 DPA10201-DPB11601 DPA10201-DPB11901 DPA10201-DPB13401 DPA10201-DPB15501 DPA10202-DPB10101 DPA10202-DPB10201 DPA10202-DPB10202 DPA10202-DPB10401 DPA10202-DPB10501 DPA10202-DPB110601 DPA10202-DPB11301 DPA10202-DPB11801 DPA10202-DPB11901 DPA10202-DPB13101 DPA10202-DPB13801; note = HLAs: DPA10202-DPB15501 DPA10202-DPB16501 DPA10301-DPB10101 DPA10301-DPB10201 DPA10301-DPB10202 DPA10301-DPB10401 DPA10301-DPB10402 DPA10301-DPB110501 DPA10301-DPB110601 DPA10301-DPB11101 DPA10301-DPB11301 DPA10301-DPB11801 DPA10301-DPB12301 DPA10301-DPB13901 DPA10301-DPB14001 DPA10301-DPB14901 DPA10301-DPB15501 DPA10301-DPB16501 DPA10301-DPB17501 DPA10301-DPB18001 DPA10401-DPB10101 DPA10401-DPB10201 DPA10401-DPB10202 DPA10401-DPB10402 DPA10401-DPB10501 DPA10401-DPB110501 DPA10401-DPB14901
KEPPFLWAGLELFPDKWTVQ

SEQ ID NO: 7141 - protein, 14 aa, synthetic construct
  source 1..14: note = Seed: PPFLWMGYELHPDK; note = HLAs: DPA10103-DPB10101 DPA10103-DPB10201 DPA10103-DPB10202 DPA10103-DPB10401 DPA10103-DPB112601 DPA10103-DPB11501 DPA10103-DPB11601 DPA10103-DPB11901 DPA10103-DPB12301 DPA10103-DPB13101 DPA10103-DPB13401 DPA10103-DPB13901 DPA10103-DPB14001 DPA10103-DPB14101 DPA10103-DPB14801 DPA10103-DPB15001 DPA10103-DPB15901 DPA10104-DPB10101 DPA10104-DPB11501 DPA10105-DPB10101 DPA10105-DPB10401 DPA10105-DPB15001 DPA10106-DPB10101 DPA10201-DPB10101 DPA10201-DPB110601 DPA10201-DPB11501 DPA10201-DPB11601 DPA10201-DPB11901 DPA10202-DPB10101 DPA10202-DPB10201 DPA10202-DPB10202 DPA10202-DPB10401 DPA10202-DPB110601 DPA10202-DPB11901 DPA10202-DPB13101 DPA10202-DPB16501 DPA10301-DPB10101 DPA10301-DPB10201 DPA10301-DPB10202 DPA10301-DPB10401 DPA10301-DPB10402 DPA10301-DPB110501 DPA10301-DPB110601 DPA10301-DPB11801 DPA10301-DPB12301 DPA10301-DPB13901 DPA10301-DPB14001 DPA10301-DPB14901 DPA10301-DPB15501 DPA10301-DPB16501 DPA10301-DPB17501 DPA10301-DPB18001 DPA10401-DPB10101 DPA10401-DPB10201; note = HLAs: DPA10401-DPB10202 DPA10401-DPB10402 DPA10401-DPB10501 DPA10401-DPB110501 DPA10401-DPB14901
PPMLWTGYELIPDK

SEQ ID NO: 7142 - protein, 14 aa, synthetic construct
  source 1..14: note = Seed: PPFLWMGYELHPDK; note = HLAs: DRB1_1001 DPA10103-DPB10101 DPA10103-DPB10201 DPA10103-DPB10202 DPA10103-DPB10401 DPA10103-DPB112601 DPA10103-DPB11501 DPA10103-DPB11601 DPA10103-DPB11901 DPA10103-DPB12301 DPA10103-DPB13101 DPA10103-DPB13401 DPA10103-DPB13901 DPA10103-DPB14001 DPA10103-DPB14101 DPA10103-DPB14801 DPA10103-DPB15001 DPA10103-DPB15901 DPA10104-DPB10101 DPA10104-DPB11501 DPA10105-DPB10101 DPA10105-DPB10401 DPA10105-DPB15001 DPA10106-DPB10101 DPA10201-DPB10101 DPA10201-DPB110601 DPA10201-DPB11501 DPA10201-DPB11601 DPA10201-DPB11901 DPA10202-DPB10101 DPA10202-DPB10201 DPA10202-DPB10202 DPA10202-DPB10401 DPA10202-DPB110601 DPA10202-DPB11901 DPA10202-DPB13101 DPA10202-DPB16501 DPA10301-DPB10101 DPA10301-DPB10201 DPA10301-DPB10202 DPA10301-DPB10401 DPA10301-DPB10402 DPA10301-DPB110501 DPA10301-DPB110601 DPA10301-DPB11801 DPA10301-DPB12301 DPA10301-DPB13901 DPA10301-DPB14001 DPA10301-DPB14901 DPA10301-DPB15501 DPA10301-DPB16501 DPA10301-DPB17501 DPA10301-DPB18001 DPA10401-DPB10101 DPA10401-DPB10201; note = HLAs: DPA10401-DPB10202 DPA10401-DPB10402 DPA10401-DPB10501 DPA10401-DPB110501 DPA10401-DPB14901
PPFLWVGYELNPDK

SEQ ID NO: 7143 - protein, 20 aa, synthetic construct
  source 1..20: note = Seed: KEPPFLWMGYELHPDKWTVQ; note = HLAs: DPA10103-DPB10101 DPA10103-DPB10201 DPA10103-DPB10202 DPA10103-DPB10401 DPA10103-DPB10402 DPA10103-DPB10501 DPA10103-DPB110501 DPA10103-DPB112601 DPA10103-DPB11601 DPA10103-DPB11901 DPA10103-DPB12301 DPA10103-DPB13101 DPA10103-DPB13401 DPA10103-DPB13901 DPA10103-DPB14001 DPA10103-DPB14101 DPA10103-DPB14801 DPA10103-DPB14901 DPA10103-DPB15001 DPA10103-DPB15101 DPA10103-DPB15501 DPA10103-DPB15901 DPA10103-DPB18001 DPA10104-DPB10101 DPA10105-DPB10101 DPA10105-DPB10401 DPA10105-DPB15001 DPA10201-DPB10201 DPA10201-DPB10202 DPA10201-DPB10401 DPA10201-DPB10501 DPA10201-DPB110601 DPA10201-DPB11501 DPA10201-DPB11601 DPA10201-DPB11901 DPA10201-DPB13401 DPA10201-DPB15501 DPA10202-DPB10101 DPA10202-DPB10201 DPA10202-DPB10202 DPA10202-DPB10401 DPA10202-DPB10501 DPA10202-DPB110601 DPA10202-DPB11101 DPA10202-DPB11301 DPA10202-DPB11801 DPA10202-DPB11901 DPA10202-DPB13101 DPA10202-DPB13801 DPA10202-DPB15501 DPA10202-DPB16501 DPA10301-DPB10101 DPA10301-DPB110601 DPA10301-DPB11101; note = HLAs: DPA10301-DPB15501 DPA10301-DPB16501 DPA10401-DPB10101 DPA10401-DPB10201 DPA10401-DPB10202 DPA10401-DPB10402 DPA10401-DPB10501 DPA10401-DPB110501 DPA10401-DPB14901
KEPPRLWIGFELLPDKWTVQ

SEQ ID NO: 7144 - protein, 20 aa, synthetic construct
  source 1..20: note = Seed: KEPPFLWMGYELHPDKWTVQ; note = HLAs: DPA10103-DPB10101 DPA10103-DPB10201 DPA10103-DPB10202 DPA10103-DPB10401 DPA10103-DPB10402 DPA10103-DPB10501 DPA10103-DPB110501 DPA10103-DPB112601 DPA10103-DPB11501 DPA10103-DPB11601 DPA10103-DPB11801 DPA10103-DPB11901 DPA10103-DPB12301 DPA10103-DPB13101 DPA10103-DPB13401 DPA10103-DPB13901 DPA10103-DPB14001 DPA10103-DPB14101 DPA10103-DPB14801 DPA10103-DPB14901 DPA10103-DPB15101 DPA10103-DPB15501 DPA10103-DPB15901 DPA10103-DPB18001 DPA10104-DPB10101 DPA10104-DPB11501 DPA10105-DPB10101 DPA10105-DPB10401 DPA10105-DPB11801 DPA10106-DPB10101 DPA10201-DPB10101 DPA10201-DPB10201 DPA10201-DPB10202 DPA10201-DPB10401 DPA10201-DPB10501 DPA10201-DPB110601 DPA10201-DPB11501 DPA10201-DPB11601 DPA10201-DPB11901 DPA10201-DPB13401 DPA10201-DPB15501 DPA10202-DPB10101 DPA10202-DPB10201 DPA10202-DPB10202 DPA10202-DPB10401 DPA10202-DPB10501 DPA10202-DPB110601 DPA10202-DPB11301 DPA10202-DPB11801 DPA10202-DPB11901 DPA10202-DPB13101 DPA10202-DPB13801 DPA10202-DPB15501 DPA10202-DPB16501 DPA10301-DPB10101; note = HLAs: DPA10301-DPB10201 DPA10301-DPB10202 DPA10301-DPB10401 DPA10301-DPB10402 DPA10301-DPB110501 DPA10301-DPB110601 DPA10301-DPB11301 DPA10301-DPB11801 DPA10301-DPB12301 DPA10301-DPB13901 DPA10301-DPB14001 DPA10301-DPB14901 DPA10301-DPB16501 DPA10301-DPB17501 DPA10301-DPB18001 DPA10401-DPB10101 DPA10401-DPB10201 DPA10401-DPB10202 DPA10401-DPB10402 DPA10401-DPB10501 DPA10401-DPB110501 DPA10401-DPB14901
KEPPMLWFGFELLPDKWTVQ

SEQ ID NO: 7145 - protein, 20 aa, synthetic construct
  source 1..20: note = Seed: KEPPFLWMGYELHPDKWTVQ; note = HLAs: DRB1_0101 DRB1_1001 DPA10103-DPB10101 DPA10103-DPB10201 DPA10103-DPB10202 DPA10103-DPB10401 DPA10103-DPB10402 DPA10103-DPB10501 DPA10103-DPB110501 DPA10103-DPB112601 DPA10103-DPB11501 DPA10103-DPB11601 DPA10103-DPB11801 DPA10103-DPB11901 DPA10103-DPB12301 DPA10103-DPB13101 DPA10103-DPB13401 DPA10103-DPB13901 DPA10103-DPB14001 DPA10103-DPB14101 DPA10103-DPB14801 DPA10103-DPB14901 DPA10103-DPB15001 DPA10103-DPB15101 DPA10103-DPB15501 DPA10103-DPB15901 DPA10103-DPB18001 DPA10104-DPB10101 DPA10104-DPB11501 DPA10105-DPB10101 DPA10105-DPB10401 DPA10105-DPB11801 DPA10105-DPB15001 DPA10106-DPB10101 DPA10201-DPB10101 DPA10201-DPB10201 DPA10201-DPB10202 DPA10201-DPB10401 DPA10201-DPB10501 DPA10201-DPB110601 DPA10201-DPB11501 DPA10201-DPB11601 DPA10201-DPB11901 DPA10201-DPB13401 DPA10201-DPB15501 DPA10202-DPB10101 DPA10202-DPB10201 DPA10202-DPB10202 DPA10202-DPB10401 DPA10202-DPB10501 DPA10202-DPB110601 DPA10202-DPB11101 DPA10202-DPB11301 DPA10202-DPB11801 DPA10202-DPB11901; note = HLAs: DPA10202-DPB13101 DPA10202-DPB13801 DPA10202-DPB15501 DPA10202-DPB16501 DPA10301-DPB10101 DPA10301-DPB10201 DPA10301-DPB10202 DPA10301-DPB10401 DPA10301-DPB10402 DPA10301-DPB110501 DPA10301-DPB110601 DPA10301-DPB11101 DPA10301-DPB11301 DPA10301-DPB11801 DPA10301-DPB12301 DPA10301-DPB13901 DPA10301-DPB14001 DPA10301-DPB14901 DPA10301-DPB15501 DPA10301-DPB16501 DPA10301-DPB17501 DPA10301-DPB18001 DPA10401-DPB10101 DPA10401-DPB10201 DPA10401-DPB10202 DPA10401-DPB10402 DPA10401-DPB10501 DPA10401-DPB110501 DPA10401-DPB14901
KEPPFLWTGIELTPDKWTVQ

SEQ ID NO: 7146 - protein, 14 aa, synthetic construct
  source 1..14: note = Seed: PPFLWMGYELHPDK; note = HLAs: DPA10103-DPB10101 DPA10103-DPB10201 DPA10103-DPB10202 DPA10103-DPB10401 DPA10103-DPB112601 DPA10103-DPB11501 DPA10103-DPB11601 DPA10103-DPB11901 DPA10103-DPB12301 DPA10103-DPB13101 DPA10103-DPB13401 DPA10103-DPB13901 DPA10103-DPB14001 DPA10103-DPB14101 DPA10103-DPB14801 DPA10103-DPB15001 DPA10103-DPB15901 DPA10104-DPB10101 DPA10104-DPB11501 DPA10105-DPB10101 DPA10105-DPB10401 DPA10105-DPB15001 DPA10106-DPB10101 DPA10201-DPB10101 DPA10201-DPB110601 DPA10201-DPB11501 DPA10201-DPB11601 DPA10201-DPB11901 DPA10202-DPB10101 DPA10202-DPB10201 DPA10202-DPB10202 DPA10202-DPB10401 DPA10202-DPB110601 DPA10202-DPB11901 DPA10202-DPB13101 DPA10202-DPB16501 DPA10301-DPB10101 DPA10301-DPB10201 DPA10301-DPB10202 DPA10301-DPB10401 DPA10301-DPB10402 DPA10301-DPB110501 DPA10301-DPB110601 DPA10301-DPB11801 DPA10301-DPB12301 DPA10301-DPB13901 DPA10301-DPB14001 DPA10301-DPB14901 DPA10301-DPB15501 DPA10301-DPB16501 DPA10301-DPB17501 DPA10301-DPB18001 DPA10401-DPB10101 DPA10401-DPB10201; note = HLAs: DPA10401-DPB10202 DPA10401-DPB10402 DPA10401-DPB10501 DPA10401-DPB110501 DPA10401-DPB14901
PPWLWTGLELLPDK

SEQ ID NO: 7147 - protein, 20 aa, synthetic construct
  source 1..20: note = Seed: KEPPFLWMGYELHPDKWTVQ; note = HLAs: DPA10103-DPB10101 DPA10103-DPB10201 DPA10103-DPB10202 DPA10103-DPB10401 DPA10103-DPB10402 DPA10103-DPB10501 DPA10103-DPB110501 DPA10103-DPB112601 DPA10103-DPB11501 DPA10103-DPB11601 DPA10103-DPB11801 DPA10103-DPB11901 DPA10103-DPB12301 DPA10103-DPB13101 DPA10103-DPB13401 DPA10103-DPB13901 DPA10103-DPB14001 DPA10103-DPB14101 DPA10103-DPB14801 DPA10103-DPB14901 DPA10103-DPB15001 DPA10103-DPB15101 DPA10103-DPB15501 DPA10103-DPB15901 DPA10103-DPB18001 DPA10104-DPB10101 DPA10104-DPB11501 DPA10105-DPB10101 DPA10105-DPB10401 DPA10105-DPB11801 DPA10105-DPB15001 DPA10106-DPB10101 DPA10201-DPB10101 DPA10201-DPB10201 DPA10201-DPB10202 DPA10201-DPB10401 DPA10201-DPB10501 DPA10201-DPB110601 DPA10201-DPB11501 DPA10201-DPB11601 DPA10201-DPB11901 DPA10201-DPB13401 DPA10201-DPB15501 DPA10202-DPB10101 DPA10202-DPB10201 DPA10202-DPB10202 DPA10202-DPB10401 DPA10202-DPB10501 DPA10202-DPB110601 DPA10202-DPB11101 DPA10202-DPB11301 DPA10202-DPB11801 DPA10202-DPB11901 DPA10202-DPB13101 DPA10202-DPB13801; note = HLAs: DPA10202-DPB15501 DPA10202-DPB16501 DPA10301-DPB10101 DPA10301-DPB10201 DPA10301-DPB10202 DPA10301-DPB10401 DPA10301-DPB10402 DPA10301-DPB110501 DPA10301-DPB110601 DPA10301-DPB11301 DPA10301-DPB11801 DPA10301-DPB12301 DPA10301-DPB13901 DPA10301-DPB14001 DPA10301-DPB14901 DPA10301-DPB15501 DPA10301-DPB16501 DPA10301-DPB17501 DPA10301-DPB18001 DPA10401-DPB10101 DPA10401-DPB10201 DPA10401-DPB10202 DPA10401-DPB10402 DPA10401-DPB10501 DPA10401-DPB110501 DPA10401-DPB14901
KEPPMLWEGFELAPDKWTVQ

SEQ ID NO: 7148 - protein, 14 aa, synthetic construct
  source 1..14: note = Seed: PPFLWMGYELHPDK; note = HLAs: DPA10103-DPB10101 DPA10103-DPB10201 DPA10103-DPB10202 DPA10103-DPB10401 DPA10103-DPB112601 DPA10103-DPB11501 DPA10103-DPB11601 DPA10103-DPB11901 DPA10103-DPB12301 DPA10103-DPB13101 DPA10103-DPB13401 DPA10103-DPB13901 DPA10103-DPB14001 DPA10103-DPB14101 DPA10103-DPB14801 DPA10103-DPB15001 DPA10103-DPB15901 DPA10104-DPB10101 DPA10104-DPB11501 DPA10105-DPB10101 DPA10105-DPB10401 DPA10105-DPB15001 DPA10106-DPB10101 DPA10201-DPB10101 DPA10201-DPB110601 DPA10201-DPB11501 DPA10201-DPB11601 DPA10201-DPB11901 DPA10202-DPB10101 DPA10202-DPB10201 DPA10202-DPB10202 DPA10202-DPB10401 DPA10202-DPB110601 DPA10202-DPB11901 DPA10202-DPB13101 DPA10202-DPB16501 DPA10301-DPB10101 DPA10301-DPB10201 DPA10301-DPB10202 DPA10301-DPB10401 DPA10301-DPB10402 DPA10301-DPB110501 DPA10301-DPB110601 DPA10301-DPB11801 DPA10301-DPB12301 DPA10301-DPB13901 DPA10301-DPB14001 DPA10301-DPB14901 DPA10301-DPB16501 DPA10301-DPB17501 DPA10301-DPB18001 DPA10401-DPB10101 DPA10401-DPB10201 DPA10401-DPB10202; note = HLAs: DPA10401-DPB10402 DPA10401-DPB10501 DPA10401-DPB110501 DPA10401-DPB14901
PPLLWSGFELQPDK

SEQ ID NO: 7149 - protein, 14 aa, synthetic construct
  source 1..14: note = Seed: PPFLWMGYELHPDK; note = HLAs: DPA10103-DPB10101 DPA10103-DPB10201 DPA10103-DPB10202 DPA10103-DPB10401 DPA10103-DPB112601 DPA10103-DPB11501 DPA10103-DPB11601 DPA10103-DPB11901 DPA10103-DPB12301 DPA10103-DPB13101 DPA10103-DPB13401 DPA10103-DPB13901 DPA10103-DPB14001 DPA10103-DPB14101 DPA10103-DPB14801 DPA10103-DPB15001 DPA10103-DPB15901 DPA10104-DPB10101 DPA10104-DPB11501 DPA10105-DPB10101 DPA10105-DPB10401 DPA10105-DPB15001 DPA10106-DPB10101 DPA10201-DPB10101 DPA10201-DPB110601 DPA10201-DPB11501 DPA10201-DPB11601 DPA10201-DPB11901 DPA10202-DPB10101 DPA10202-DPB10201 DPA10202-DPB10202 DPA10202-DPB10401 DPA10202-DPB110601 DPA10202-DPB11901 DPA10202-DPB13101 DPA10202-DPB16501 DPA10301-DPB10101 DPA10301-DPB10201 DPA10301-DPB10202 DPA10301-DPB10401 DPA10301-DPB10402 DPA10301-DPB110501 DPA10301-DPB110601 DPA10301-DPB11801 DPA10301-DPB12301 DPA10301-DPB13901 DPA10301-DPB14001 DPA10301-DPB14901 DPA10301-DPB16501 DPA10301-DPB17501 DPA10301-DPB18001 DPA10401-DPB10101 DPA10401-DPB10201 DPA10401-DPB10202; note = HLAs: DPA10401-DPB10402 DPA10401-DPB10501 DPA10401-DPB110501 DPA10401-DPB14901
PPFLWEGFELGPDK

SEQ ID NO: 7150 - protein, 20 aa, synthetic construct
  source 1..20: note = Seed: KEPPFLWMGYELHPDKWTVQ; note = HLAs: DRB1_0101 DRB1_1001 DPA10103-DPB10201 DPA10103-DPB10202 DPA10103-DPB11501 DPA10103-DPB11601 DPA10103-DPB11801 DPA10103-DPB11901 DPA10103-DPB13401 DPA10103-DPB14001 DPA10103-DPB14101 DPA10103-DPB14801 DPA10104-DPB11501 DPA10105-DPB11801 DPA10106-DPB10101 DPA10201-DPB10101 DPA10201-DPB10201 DPA10201-DPB10202 DPA10201-DPB11501 DPA10201-DPB11601 DPA10202-DPB10201 DPA10202-DPB110601 DPA10202-DPB11801 DPA10202-DPB11901 DPA10301-DPB10101 DPA10301-DPB10201 DPA10301-DPB10202 DPA10301-DPB10401 DPA10301-DPB10402 DPA10301-DPB110501 DPA10301-DPB110601 DPA10301-DPB11301 DPA10301-DPB11801 DPA10301-DPB12301 DPA10301-DPB13901 DPA10301-DPB14001 DPA10301-DPB14901 DPA10301-DPB15501 DPA10301-DPB16501 DPA10301-DPB17501 DPA10301-DPB18001 DPA10401-DPB10201 DPA10401-DPB10202 DPA10401-DPB10402 DPA10401-DPB10501 DPA10401-DPB110501 DPA10401-DPB14901
KEPPLLWAGIELLPDKWTVQ

SEQ ID NO: 7151 - protein, 20 aa, synthetic construct
  source 1..20: note = Seed: KEPPFLWMGYELHPDKWTVQ; note = HLAs: DPA10103-DPB10101 DPA10103-DPB10201 DPA10103-DPB10202 DPA10103-DPB10401 DPA10103-DPB10402 DPA10103-DPB10501 DPA10103-DPB110501 DPA10103-DPB112601 DPA10103-DPB11501 DPA10103-DPB11601 DPA10103-DPB11801 DPA10103-DPB11901 DPA10103-DPB12301 DPA10103-DPB13101 DPA10103-DPB13401 DPA10103-DPB13901 DPA10103-DPB14001 DPA10103-DPB14101 DPA10103-DPB14801 DPA10103-DPB14901 DPA10103-DPB15001 DPA10103-DPB15101 DPA10103-DPB15501 DPA10103-DPB15901 DPA10103-DPB18001 DPA10104-DPB10101 DPA10104-DPB11501 DPA10105-DPB10101 DPA10105-DPB10401 DPA10105-DPB11801 DPA10105-DPB15001 DPA10106-DPB10101 DPA10201-DPB10101 DPA10201-DPB10201 DPA10201-DPB10202 DPA10201-DPB10401 DPA10201-DPB10501 DPA10201-DPB110601 DPA10201-DPB11501 DPA10201-DPB11601 DPA10201-DPB11901 DPA10201-DPB13401 DPA10201-DPB15501 DPA10202-DPB10101 DPA10202-DPB10201 DPA10202-DPB10202 DPA10202-DPB10401 DPA10202-DPB10501 DPA10202-DPB110601 DPA10202-DPB11101 DPA10202-DPB11301 DPA10202-DPB11801 DPA10202-DPB11901 DPA10202-DPB13101 DPA10202-DPB13801; note = HLAs: DPA10202-DPB15501 DPA10202-DPB16501 DPA10301-DPB10101 DPA10301-DPB10201 DPA10301-DPB10202 DPA10301-DPB10401 DPA10301-DPB10402 DPA10301-DPB110501 DPA10301-DPB110601 DPA10301-DPB11101 DPA10301-DPB11301 DPA10301-DPB11801 DPA10301-DPB12301 DPA10301-DPB13901 DPA10301-DPB14001 DPA10301-DPB14901 DPA10301-DPB15501 DPA10301-DPB16501 DPA10301-DPB17501 DPA10301-DPB18001 DPA10401-DPB10101 DPA10401-DPB10201 DPA10401-DPB10202 DPA10401-DPB10402 DPA10401-DPB10501 DPA10401-DPB110501 DPA10401-DPB14901
KEPPMLWEGFELMPDKWTVQ

SEQ ID NO: 7152 - protein, 20 aa, synthetic construct
  source 1..20: note = Seed: KEPPFLWMGYELHPDKWTVQ; note = HLAs: DRB1_0405 DRB1_1001 DPA10103-DPB10101 DPA10103-DPB10201 DPA10103-DPB10202 DPA10103-DPB10401 DPA10103-DPB10402 DPA10103-DPB10501 DPA10103-DPB110501 DPA10103-DPB112601 DPA10103-DPB11501 DPA10103-DPB11601 DPA10103-DPB11801 DPA10103-DPB11901 DPA10103-DPB12301 DPA10103-DPB13101 DPA10103-DPB13401 DPA10103-DPB13901 DPA10103-DPB14001 DPA10103-DPB14101 DPA10103-DPB14801 DPA10103-DPB14901 DPA10103-DPB15001 DPA10103-DPB15101 DPA10103-DPB15501 DPA10103-DPB15901 DPA10103-DPB18001 DPA10104-DPB10101 DPA10104-DPB11501 DPA10105-DPB10101 DPA10105-DPB10401 DPA10105-DPB11801 DPA10105-DPB15001 DPA10106-DPB10101 DPA10201-DPB10101 DPA10201-DPB10201 DPA10201-DPB10202 DPA10201-DPB10401 DPA10201-DPB10501 DPA10201-DPB110601 DPA10201-DPB11501 DPA10201-DPB11601 DPA10201-DPB11901 DPA10201-DPB13401 DPA10201-DPB15501 DPA10202-DPB10101 DPA10202-DPB10201 DPA10202-DPB10202 DPA10202-DPB10401 DPA10202-DPB10501 DPA10202-DPB110601 DPA10202-DPB11101 DPA10202-DPB11301 DPA10202-DPB11801 DPA10202-DPB11901; note = HLAs: DPA10202-DPB13101 DPA10202-DPB13801 DPA10202-DPB15501 DPA10202-DPB16501 DPA10301-DPB10101 DPA10301-DPB10201 DPA10301-DPB10202 DPA10301-DPB10401 DPA10301-DPB10402 DPA10301-DPB110501 DPA10301-DPB110601 DPA10301-DPB11101 DPA10301-DPB11301 DPA10301-DPB11801 DPA10301-DPB12301 DPA10301-DPB13901 DPA10301-DPB14001 DPA10301-DPB14901 DPA10301-DPB15501 DPA10301-DPB16501 DPA10301-DPB17501 DPA10301-DPB18001 DPA10401-DPB10101 DPA10401-DPB10201 DPA10401-DPB10202 DPA10401-DPB10402 DPA10401-DPB10501 DPA10401-DPB110501 DPA10401-DPB14901
KEPPFLWMGFELDPDKWTVQ

SEQ ID NO: 7153 - protein, 14 aa, synthetic construct
  source 1..14: note = Seed: PPFLWMGYELHPDK; note = HLAs: DPA10103-DPB10101 DPA10103-DPB10201 DPA10103-DPB10202 DPA10103-DPB10401 DPA10103-DPB112601 DPA10103-DPB11501 DPA10103-DPB11601 DPA10103-DPB11901 DPA10103-DPB12301 DPA10103-DPB13101 DPA10103-DPB13401 DPA10103-DPB13901 DPA10103-DPB14001 DPA10103-DPB14101 DPA10103-DPB14801 DPA10103-DPB15001 DPA10103-DPB15901 DPA10104-DPB10101 DPA10104-DPB11501 DPA10105-DPB10101 DPA10105-DPB10401 DPA10105-DPB15001 DPA10106-DPB10101 DPA10201-DPB10101 DPA10201-DPB110601 DPA10201-DPB11501 DPA10201-DPB11601 DPA10201-DPB11901 DPA10202-DPB10101 DPA10202-DPB10201 DPA10202-DPB10202 DPA10202-DPB10401 DPA10202-DPB110601 DPA10202-DPB11901 DPA10202-DPB13101 DPA10202-DPB16501 DPA10301-DPB10101 DPA10301-DPB10201 DPA10301-DPB10202 DPA10301-DPB10401 DPA10301-DPB10402 DPA10301-DPB110501 DPA10301-DPB110601 DPA10301-DPB11801 DPA10301-DPB12301 DPA10301-DPB13901 DPA10301-DPB14001 DPA10301-DPB14901 DPA10301-DPB15501 DPA10301-DPB16501 DPA10301-DPB17501 DPA10301-DPB18001 DPA10401-DPB10101 DPA10401-DPB10201; note = HLAs: DPA10401-DPB10202 DPA10401-DPB10402 DPA10401-DPB10501 DPA10401-DPB110501 DPA10401-DPB14901
PPFLWGGFELYPDK

SEQ ID NO: 7154 - protein, 14 aa, synthetic construct
  source 1..14: note = Seed: PPFLWMGYELHPDK; note = HLAs: DPA10103-DPB10101 DPA10103-DPB10201 DPA10103-DPB10202 DPA10103-DPB10401 DPA10103-DPB112601 DPA10103-DPB11501 DPA10103-DPB11601 DPA10103-DPB11901 DPA10103-DPB12301 DPA10103-DPB13101 DPA10103-DPB13401 DPA10103-DPB13901 DPA10103-DPB14001 DPA10103-DPB14101 DPA10103-DPB14801 DPA10103-DPB15001 DPA10103-DPB15901 DPA10104-DPB10101 DPA10104-DPB11501 DPA10105-DPB10101 DPA10105-DPB10401 DPA10105-DPB15001 DPA10106-DPB10101 DPA10201-DPB10101 DPA10201-DPB110601 DPA10201-DPB11501 DPA10201-DPB11601 DPA10201-DPB11901 DPA10202-DPB10101 DPA10202-DPB10201 DPA10202-DPB10202 DPA10202-DPB10401 DPA10202-DPB110601 DPA10202-DPB11901 DPA10202-DPB13101 DPA10202-DPB16501 DPA10301-DPB10101 DPA10301-DPB10201 DPA10301-DPB10202 DPA10301-DPB10401 DPA10301-DPB10402 DPA10301-DPB110501 DPA10301-DPB110601 DPA10301-DPB11801 DPA10301-DPB12301 DPA10301-DPB13901 DPA10301-DPB14001 DPA10301-DPB14901 DPA10301-DPB15501 DPA10301-DPB16501 DPA10301-DPB17501 DPA10301-DPB18001 DPA10401-DPB10101 DPA10401-DPB10201; note = HLAs: DPA10401-DPB10202 DPA10401-DPB10402 DPA10401-DPB10501 DPA10401-DPB110501 DPA10401-DPB14901
PPWLWSGWELLPDK

SEQ ID NO: 7155 - protein, 20 aa, synthetic construct
  source 1..20: note = Seed: KEPPFLWMGYELHPDKWTVQ; note = HLAs: DPA10103-DPB10101 DPA10103-DPB10201 DPA10103-DPB10202 DPA10103-DPB10401 DPA10103-DPB10402 DPA10103-DPB10501 DPA10103-DPB110501 DPA10103-DPB112601 DPA10103-DPB11501 DPA10103-DPB11601 DPA10103-DPB11801 DPA10103-DPB11901 DPA10103-DPB12301 DPA10103-DPB13101 DPA10103-DPB13401 DPA10103-DPB13901 DPA10103-DPB14001 DPA10103-DPB14101 DPA10103-DPB14801 DPA10103-DPB14901 DPA10103-DPB15001 DPA10103-DPB15101 DPA10103-DPB15501 DPA10103-DPB15901 DPA10103-DPB18001 DPA10104-DPB10101 DPA10104-DPB11501 DPA10105-DPB10101 DPA10105-DPB10401 DPA10105-DPB11801 DPA10105-DPB15001 DPA10106-DPB10101 DPA10201-DPB10101 DPA10201-DPB10201 DPA10201-DPB10202 DPA10201-DPB10401 DPA10201-DPB10501 DPA10201-DPB110601 DPA10201-DPB11501 DPA10201-DPB11601 DPA10201-DPB11901 DPA10201-DPB13401 DPA10201-DPB15501 DPA10202-DPB10101 DPA10202-DPB10201 DPA10202-DPB10202 DPA10202-DPB10401 DPA10202-DPB10501 DPA10202-DPB110601 DPA10202-DPB11101 DPA10202-DPB11301 DPA10202-DPB11801 DPA10202-DPB11901 DPA10202-DPB13101 DPA10202-DPB13801; note = HLAs: DPA10202-DPB15501 DPA10202-DPB16501 DPA10301-DPB10101 DPA10301-DPB10201 DPA10301-DPB10202 DPA10301-DPB10401 DPA10301-DPB10402 DPA10301-DPB110501 DPA10301-DPB110601 DPA10301-DPB11101 DPA10301-DPB11301 DPA10301-DPB11801 DPA10301-DPB12301 DPA10301-DPB13901 DPA10301-DPB14001 DPA10301-DPB14901 DPA10301-DPB15501 DPA10301-DPB16501 DPA10301-DPB17501 DPA10301-DPB18001 DPA10401-DPB10101 DPA10401-DPB10201 DPA10401-DPB10202 DPA10401-DPB10402 DPA10401-DPB10501 DPA10401-DPB110501 DPA10401-DPB14901
KEPPLLWVGFELEPDKWTVQ

SEQ ID NO: 7156 - protein, 20 aa, synthetic construct
  source 1..20: note = Seed: KEPPFLWMGYELHPDKWTVQ; note = HLAs: DRB1_0101 DRB1_0405 DRB1_1001 DPA10103-DPB10101 DPA10103-DPB10201 DPA10103-DPB10202 DPA10103-DPB10401 DPA10103-DPB10402 DPA10103-DPB10501 DPA10103-DPB110501 DPA10103-DPB112601 DPA10103-DPB11501 DPA10103-DPB11601 DPA10103-DPB11801 DPA10103-DPB11901 DPA10103-DPB12301 DPA10103-DPB13101 DPA10103-DPB13401 DPA10103-DPB13901 DPA10103-DPB14001 DPA10103-DPB14101 DPA10103-DPB14801 DPA10103-DPB14901 DPA10103-DPB15001 DPA10103-DPB15101 DPA10103-DPB15501 DPA10103-DPB15901 DPA10103-DPB18001 DPA10104-DPB10101 DPA10104-DPB11501 DPA10105-DPB10101 DPA10105-DPB10401 DPA10105-DPB11801 DPA10105-DPB15001 DPA10106-DPB10101 DPA10201-DPB10101 DPA10201-DPB10201 DPA10201-DPB10202 DPA10201-DPB10401 DPA10201-DPB10501 DPA10201-DPB110601 DPA10201-DPB11501 DPA10201-DPB11601 DPA10201-DPB11901 DPA10201-DPB13401 DPA10201-DPB15501 DPA10202-DPB10101 DPA10202-DPB10201 DPA10202-DPB10202 DPA10202-DPB10401 DPA10202-DPB10501 DPA10202-DPB110601 DPA10202-DPB11101 DPA10202-DPB11301 DPA10202-DPB11801 DPA10202-DPB11901; note = HLAs: DPA10202-DPB13101 DPA10202-DPB13801 DPA10202-DPB15501 DPA10202-DPB16501 DPA10301-DPB10101 DPA10301-DPB10201 DPA10301-DPB10202 DPA10301-DPB10401 DPA10301-DPB10402 DPA10301-DPB110501 DPA10301-DPB110601 DPA10301-DPB11101 DPA10301-DPB11301 DPA10301-DPB11801 DPA10301-DPB12301 DPA10301-DPB13901 DPA10301-DPB14001 DPA10301-DPB14901 DPA10301-DPB15501 DPA10301-DPB16501 DPA10301-DPB17501 DPA10301-DPB18001 DPA10401-DPB10201 DPA10401-DPB10202 DPA10401-DPB10402 DPA10401-DPB10501 DPA10401-DPB110501 DPA10401-DPB14901
KEPPFLWFGIELVPDKWTVQ

SEQ ID NO: 7157 - protein, 20 aa, synthetic construct
  source 1..20: note = Seed: KEPPFLWMGYELHPDKWTVQ; note = HLAs: DPA10103-DPB10101 DPA10103-DPB10201 DPA10103-DPB10202 DPA10103-DPB10401 DPA10103-DPB10402 DPA10103-DPB10501 DPA10103-DPB110501 DPA10103-DPB112601 DPA10103-DPB11501 DPA10103-DPB11601 DPA10103-DPB11801 DPA10103-DPB11901 DPA10103-DPB12301 DPA10103-DPB13101 DPA10103-DPB13401 DPA10103-DPB13901 DPA10103-DPB14001 DPA10103-DPB14101 DPA10103-DPB14801 DPA10103-DPB14901 DPA10103-DPB15001 DPA10103-DPB15101 DPA10103-DPB15501 DPA10103-DPB15901 DPA10103-DPB18001 DPA10104-DPB10101 DPA10104-DPB11501 DPA10105-DPB10101 DPA10105-DPB10401 DPA10105-DPB11801 DPA10105-DPB15001 DPA10106-DPB10101 DPA10201-DPB10101 DPA10201-DPB10201 DPA10201-DPB10202 DPA10201-DPB10401 DPA10201-DPB10501 DPA10201-DPB110601 DPA10201-DPB11501 DPA10201-DPB11601 DPA10201-DPB11901 DPA10201-DPB13401 DPA10201-DPB15501 DPA10202-DPB10101 DPA10202-DPB10201 DPA10202-DPB10202 DPA10202-DPB10401 DPA10202-DPB10501 DPA10202-DPB110601 DPA10202-DPB11101 DPA10202-DPB11301 DPA10202-DPB11801 DPA10202-DPB11901 DPA10202-DPB13101 DPA10202-DPB13801; note = HLAs: DPA10202-DPB15501 DPA10202-DPB16501 DPA10301-DPB10101 DPA10301-DPB10201 DPA10301-DPB10202 DPA10301-DPB10401 DPA10301-DPB10402 DPA10301-DPB110501 DPA10301-DPB110601 DPA10301-DPB11101 DPA10301-DPB11301 DPA10301-DPB12301 DPA10301-DPB13901 DPA10301-DPB14001 DPA10301-DPB14901 DPA10301-DPB15501 DPA10301-DPB16501 DPA10301-DPB17501 DPA10301-DPB18001 DPA10401-DPB10101 DPA10401-DPB10201 DPA10401-DPB10202 DPA10401-DPB10402 DPA10401-DPB10501 DPA10401-DPB110501 DPA10401-DPB14901
KEPPRLWTGFELIPDKWTVQ

SEQ ID NO: 7158 - protein, 20 aa, synthetic construct
  source 1..20: note = Seed: KEPPFLWMGYELHPDKWTVQ; note = HLAs: DRB1_0101 DRB1_0405 DRB1_1001 DPA10103-DPB10101 DPA10103-DPB10201 DPA10103-DPB10202 DPA10103-DPB10401 DPA10103-DPB10402 DPA10103-DPB10501 DPA10103-DPB110501 DPA10103-DPB112601 DPA10103-DPB11501 DPA10103-DPB11601 DPA10103-DPB11801 DPA10103-DPB11901 DPA10103-DPB12301 DPA10103-DPB13101 DPA10103-DPB13401 DPA10103-DPB13901 DPA10103-DPB14001 DPA10103-DPB14101 DPA10103-DPB14801 DPA10103-DPB14901 DPA10103-DPB15001 DPA10103-DPB15101 DPA10103-DPB15501 DPA10103-DPB15901 DPA10103-DPB18001 DPA10104-DPB10101 DPA10104-DPB11501 DPA10105-DPB10101 DPA10105-DPB10401 DPA10105-DPB11801 DPA10105-DPB15001 DPA10106-DPB10101 DPA10201-DPB10101 DPA10201-DPB10201 DPA10201-DPB10202 DPA10201-DPB10401 DPA10201-DPB10501 DPA10201-DPB110601 DPA10201-DPB11501 DPA10201-DPB11601 DPA10201-DPB11901 DPA10201-DPB13401 DPA10201-DPB15501 DPA10202-DPB10101 DPA10202-DPB10201 DPA10202-DPB10202 DPA10202-DPB10501 DPA10202-DPB110601 DPA10202-DPB11101 DPA10202-DPB11301 DPA10202-DPB11801 DPA10202-DPB11901 DPA10202-DPB13101; note = HLAs: DPA10202-DPB13801 DPA10202-DPB15501 DPA10202-DPB16501 DPA10301-DPB10101 DPA10301-DPB10201 DPA10301-DPB10202 DPA10301-DPB10401 DPA10301-DPB10402 DPA10301-DPB110501 DPA10301-DPB110601 DPA10301-DPB11101 DPA10301-DPB11301 DPA10301-DPB11801 DPA10301-DPB12301 DPA10301-DPB13901 DPA10301-DPB14001 DPA10301-DPB14901 DPA10301-DPB15501 DPA10301-DPB16501 DPA10301-DPB17501 DPA10301-DPB18001 DPA10401-DPB10101 DPA10401-DPB10201 DPA10401-DPB10202 DPA10401-DPB10402 DPA10401-DPB10501 DPA10401-DPB110501 DPA10401-DPB14901
KEPPFLWAGIELMPDKWTVQ

SEQ ID NO: 7159 - protein, 20 aa, synthetic construct
  source 1..20: note = Seed: KEPPFLWMGYELHPDKWTVQ; note = HLAs: DRB1_0101 DRB1_0405 DRB1_1001 DPA10103-DPB10101 DPA10103-DPB10201 DPA10103-DPB10202 DPA10103-DPB10401 DPA10103-DPB10402 DPA10103-DPB10501 DPA10103-DPB110501 DPA10103-DPB112601 DPA10103-DPB11501 DPA10103-DPB11601 DPA10103-DPB11801 DPA10103-DPB11901 DPA10103-DPB12301 DPA10103-DPB13101 DPA10103-DPB13401 DPA10103-DPB13901 DPA10103-DPB14001 DPA10103-DPB14101 DPA10103-DPB14801 DPA10103-DPB14901 DPA10103-DPB15001 DPA10103-DPB15101 DPA10103-DPB15501 DPA10103-DPB15901 DPA10103-DPB18001 DPA10104-DPB10101 DPA10104-DPB11501 DPA10105-DPB10101 DPA10105-DPB10401 DPA10105-DPB11801 DPA10105-DPB15001 DPA10106-DPB10101 DPA10201-DPB10101 DPA10201-DPB10201 DPA10201-DPB10202 DPA10201-DPB10401 DPA10201-DPB10501 DPA10201-DPB110601 DPA10201-DPB11501 DPA10201-DPB11601 DPA10201-DPB11901 DPA10201-DPB13401 DPA10201-DPB15501 DPA10202-DPB10101 DPA10202-DPB10201 DPA10202-DPB10202 DPA10202-DPB10401 DPA10202-DPB10501 DPA10202-DPB110601 DPA10202-DPB11101 DPA10202-DPB11301 DPA10202-DPB11801 DPA10202-DPB11901; note = HLAs: DPA10202-DPB13101 DPA10202-DPB13801 DPA10202-DPB15501 DPA10202-DPB16501 DPA10301-DPB10101 DPA10301-DPB10201 DPA10301-DPB10202 DPA10301-DPB10401 DPA10301-DPB10402 DPA10301-DPB110501 DPA10301-DPB110601 DPA10301-DPB11101 DPA10301-DPB11301 DPA10301-DPB11801 DPA10301-DPB12301 DPA10301-DPB13901 DPA10301-DPB14001 DPA10301-DPB14901 DPA10301-DPB15501 DPA10301-DPB16501 DPA10301-DPB17501 DPA10301-DPB18001 DPA10401-DPB10101 DPA10401-DPB10201 DPA10401-DPB10202 DPA10401-DPB10402 DPA10401-DPB10501 DPA10401-DPB110501 DPA10401-DPB14901
KEPPFLWMGIELVPDKWTVQ

SEQ ID NO: 7160 - protein, 14 aa, synthetic construct
  source 1..14: note = Seed: PPFLWMGYELHPDK; note = HLAs: DRB1_1001 DPA10103-DPB10101 DPA10103-DPB10201 DPA10103-DPB10202 DPA10103-DPB10401 DPA10103-DPB112601 DPA10103-DPB11501 DPA10103-DPB11601 DPA10103-DPB11901 DPA10103-DPB12301 DPA10103-DPB13101 DPA10103-DPB13401 DPA10103-DPB13901 DPA10103-DPB14001 DPA10103-DPB14101 DPA10103-DPB14801 DPA10103-DPB15001 DPA10103-DPB15901 DPA10104-DPB10101 DPA10104-DPB11501 DPA10105-DPB10101 DPA10105-DPB10401 DPA10105-DPB15001 DPA10106-DPB10101 DPA10201-DPB10101 DPA10201-DPB110601 DPA10201-DPB11501 DPA10201-DPB11601 DPA10201-DPB11901 DPA10202-DPB10101 DPA10202-DPB10201 DPA10202-DPB10202 DPA10202-DPB110601 DPA10202-DPB11901 DPA10202-DPB13101 DPA10202-DPB16501 DPA10301-DPB10101 DPA10301-DPB10201 DPA10301-DPB10202 DPA10301-DPB10401 DPA10301-DPB10402 DPA10301-DPB110501 DPA10301-DPB110601 DPA10301-DPB11801 DPA10301-DPB12301 DPA10301-DPB13901 DPA10301-DPB14001 DPA10301-DPB14901 DPA10301-DPB15501 DPA10301-DPB16501 DPA10301-DPB17501 DPA10301-DPB18001 DPA10401-DPB10101 DPA10401-DPB10201 DPA10401-DPB10202; note = HLAs: DPA10401-DPB10402 DPA10401-DPB10501 DPA10401-DPB110501 DPA10401-DPB14901
PPFLWAGIELFPDK

SEQ ID NO: 7161 - protein, 20 aa, synthetic construct
  source 1..20: note = Seed: KEPPFLWMGYELHPDKWTVQ; note = HLAs: DPA10103-DPB10101 DPA10103-DPB10201 DPA10103-DPB10202 DPA10103-DPB10401 DPA10103-DPB10402 DPA10103-DPB10501 DPA10103-DPB110501 DPA10103-DPB112601 DPA10103-DPB11501 DPA10103-DPB11601 DPA10103-DPB11801 DPA10103-DPB11901 DPA10103-DPB12301 DPA10103-DPB13101 DPA10103-DPB13401 DPA10103-DPB13901 DPA10103-DPB14001 DPA10103-DPB14101 DPA10103-DPB14801 DPA10103-DPB14901 DPA10103-DPB15001 DPA10103-DPB15101 DPA10103-DPB15501 DPA10103-DPB15901 DPA10103-DPB18001 DPA10104-DPB10101 DPA10104-DPB11501 DPA10105-DPB10101 DPA10105-DPB10401 DPA10105-DPB11801 DPA10105-DPB15001 DPA10106-DPB10101 DPA10201-DPB10101 DPA10201-DPB10201 DPA10201-DPB10202 DPA10201-DPB10401 DPA10201-DPB10501 DPA10201-DPB110601 DPA10201-DPB11501 DPA10201-DPB11601 DPA10201-DPB11901 DPA10201-DPB13401 DPA10201-DPB15501 DPA10202-DPB10101 DPA10202-DPB10201 DPA10202-DPB10202 DPA10202-DPB10401 DPA10202-DPB10501 DPA10202-DPB110601 DPA10202-DPB11101 DPA10202-DPB11301 DPA10202-DPB11801 DPA10202-DPB11901 DPA10202-DPB13101 DPA10202-DPB13801; note = HLAs: DPA10202-DPB15501 DPA10202-DPB16501 DPA10301-DPB10101 DPA10301-DPB10201 DPA10301-DPB10202 DPA10301-DPB10401 DPA10301-DPB10402 DPA10301-DPB110501 DPA10301-DPB110601 DPA10301-DPB11101 DPA10301-DPB11301 DPA10301-DPB11801 DPA10301-DPB12301 DPA10301-DPB13901 DPA10301-DPB14001 DPA10301-DPB14901 DPA10301-DPB15501 DPA10301-DPB16501 DPA10301-DPB17501 DPA10301-DPB18001 DPA10401-DPB10101 DPA10401-DPB10201 DPA10401-DPB10202 DPA10401-DPB10402 DPA10401-DPB10501 DPA10401-DPB110501 DPA10401-DPB14901
KEPPFLWHGMELFPDKWTVQ

SEQ ID NO: 7162 - protein, 20 aa, synthetic construct
  source 1..20: note = Seed: KEPPFLWMGYELHPDKWTVQ; note = HLAs: DRB1_0101 DRB1_1001 DPA10103-DPB10101 DPA10103-DPB10201 DPA10103-DPB10202 DPA10103-DPB10401 DPA10103-DPB10402 DPA10103-DPB10501 DPA10103-DPB110501 DPA10103-DPB112601 DPA10103-DPB11501 DPA10103-DPB11601 DPA10103-DPB11801 DPA10103-DPB11901 DPA10103-DPB12301 DPA10103-DPB13101 DPA10103-DPB13401 DPA10103-DPB13901 DPA10103-DPB14001 DPA10103-DPB14101 DPA10103-DPB14801 DPA10103-DPB14901 DPA10103-DPB15001 DPA10103-DPB15101 DPA10103-DPB15501 DPA10103-DPB15901 DPA10103-DPB18001 DPA10104-DPB10101 DPA10104-DPB11501 DPA10105-DPB10101 DPA10105-DPB10401 DPA10105-DPB11801 DPA10105-DPB15001 DPA10106-DPB10101 DPA10201-DPB10101 DPA10201-DPB10201 DPA10201-DPB10202 DPA10201-DPB10401 DPA10201-DPB10501 DPA10201-DPB110601 DPA10201-DPB11501 DPA10201-DPB11601 DPA10201-DPB11901 DPA10201-DPB13401 DPA10201-DPB15501 DPA10202-DPB10101 DPA10202-DPB10201 DPA10202-DPB10202 DPA10202-DPB10401 DPA10202-DPB10501 DPA10202-DPB110601 DPA10202-DPB11101 DPA10202-DPB11301 DPA10202-DPB11801 DPA10202-DPB11901; note = HLAs: DPA10202-DPB13101 DPA10202-DPB13801 DPA10202-DPB15501 DPA10202-DPB16501 DPA10301-DPB10101 DPA10301-DPB10201 DPA10301-DPB10202 DPA10301-DPB10401 DPA10301-DPB10402 DPA10301-DPB110501 DPA10301-DPB110601 DPA10301-DPB11101 DPA10301-DPB11301 DPA10301-DPB11801 DPA10301-DPB12301 DPA10301-DPB13901 DPA10301-DPB14001 DPA10301-DPB14901 DPA10301-DPB15501 DPA10301-DPB16501 DPA10301-DPB17501 DPA10301-DPB18001 DPA10401-DPB10101 DPA10401-DPB10201 DPA10401-DPB10202 DPA10401-DPB10402 DPA10401-DPB10501 DPA10401-DPB110501 DPA10401-DPB14901
KEPPYLWLGFELAPDKWTVQ

SEQ ID NO: 7163 - protein, 20 aa, synthetic construct
  source 1..20: note = Seed: KEPPFLWMGYELHPDKWTVQ; note = HLAs: DPA10103-DPB10101 DPA10103-DPB10201 DPA10103-DPB10202 DPA10103-DPB10401 DPA10103-DPB10402 DPA10103-DPB10501 DPA10103-DPB110501 DPA10103-DPB112601 DPA10103-DPB11501 DPA10103-DPB11601 DPA10103-DPB11801 DPA10103-DPB11901 DPA10103-DPB12301 DPA10103-DPB13101 DPA10103-DPB13401 DPA10103-DPB13901 DPA10103-DPB14001 DPA10103-DPB14101 DPA10103-DPB14801 DPA10103-DPB14901 DPA10103-DPB15001 DPA10103-DPB15101 DPA10103-DPB15501 DPA10103-DPB15901 DPA10103-DPB18001 DPA10104-DPB10101 DPA10104-DPB11501 DPA10105-DPB10101 DPA10105-DPB10401 DPA10105-DPB11801 DPA10105-DPB15001 DPA10106-DPB10101 DPA10201-DPB10101 DPA10201-DPB10201 DPA10201-DPB10202 DPA10201-DPB10401 DPA10201-DPB10501 DPA10201-DPB110601 DPA10201-DPB11501 DPA10201-DPB11601 DPA10201-DPB11901 DPA10201-DPB13401 DPA10201-DPB15501 DPA10202-DPB10101 DPA10202-DPB10201 DPA10202-DPB10202 DPA10202-DPB10401 DPA10202-DPB10501 DPA10202-DPB110601 DPA10202-DPB11101 DPA10202-DPB11301 DPA10202-DPB11801 DPA10202-DPB11901 DPA10202-DPB13101 DPA10202-DPB13801; note = HLAs: DPA10202-DPB15501 DPA10202-DPB16501 DPA10301-DPB10101 DPA10301-DPB10201 DPA10301-DPB10202 DPA10301-DPB10401 DPA10301-DPB10402 DPA10301-DPB110501 DPA10301-DPB110601 DPA10301-DPB11101 DPA10301-DPB11301 DPA10301-DPB11801 DPA10301-DPB12301 DPA10301-DPB13901 DPA10301-DPB14001 DPA10301-DPB14901 DPA10301-DPB15501 DPA10301-DPB16501 DPA10301-DPB17501 DPA10301-DPB18001 DPA10401-DPB10101 DPA10401-DPB10201 DPA10401-DPB10202 DPA10401-DPB10402 DPA10401-DPB10501 DPA10401-DPB110501 DPA10401-DPB14901
KEPPWLWQGFELFPDKWTVQ

SEQ ID NO: 7164 - protein, 20 aa, synthetic construct
  source 1..20: note = Seed: KEPPFLWMGYELHPDKWTVQ; note = HLAs: DRB1_0101 DRB1_0405 DRB1_1001 DPA10103-DPB10101 DPA10103-DPB10201 DPA10103-DPB10202 DPA10103-DPB10401 DPA10103-DPB10402 DPA10103-DPB10501 DPA10103-DPB110501 DPA10103-DPB112601 DPA10103-DPB11501 DPA10103-DPB11601 DPA10103-DPB11801 DPA10103-DPB11901 DPA10103-DPB12301 DPA10103-DPB13101 DPA10103-DPB13401 DPA10103-DPB13901 DPA10103-DPB14001 DPA10103-DPB14101 DPA10103-DPB14801 DPA10103-DPB14901 DPA10103-DPB15001 DPA10103-DPB15101 DPA10103-DPB15501 DPA10103-DPB15901 DPA10103-DPB18001 DPA10104-DPB10101 DPA10104-DPB11501 DPA10105-DPB10101 DPA10105-DPB10401 DPA10105-DPB11801 DPA10105-DPB15001 DPA10106-DPB10101 DPA10201-DPB10101 DPA10201-DPB10201 DPA10201-DPB10202 DPA10201-DPB10401 DPA10201-DPB10501 DPA10201-DPB110601 DPA10201-DPB11501 DPA10201-DPB11601 DPA10201-DPB11901 DPA10201-DPB13401 DPA10201-DPB15501 DPA10202-DPB10101 DPA10202-DPB10201 DPA10202-DPB10202 DPA10202-DPB10401 DPA10202-DPB10501 DPA10202-DPB110601 DPA10202-DPB11101 DPA10202-DPB11301 DPA10202-DPB11801 DPA10202-DPB11901; note = HLAs: DPA10202-DPB13101 DPA10202-DPB13801 DPA10202-DPB15501 DPA10202-DPB16501 DPA10301-DPB10101 DPA10301-DPB10201 DPA10301-DPB10202 DPA10301-DPB10401 DPA10301-DPB10402 DPA10301-DPB110501 DPA10301-DPB110601 DPA10301-DPB11101 DPA10301-DPB11301 DPA10301-DPB11801 DPA10301-DPB12301 DPA10301-DPB13901 DPA10301-DPB14001 DPA10301-DPB14901 DPA10301-DPB15501 DPA10301-DPB16501 DPA10301-DPB17501 DPA10301-DPB18001 DPA10401-DPB10201 DPA10401-DPB10202 DPA10401-DPB10402 DPA10401-DPB10501 DPA10401-DPB110501 DPA10401-DPB14901
KEPPFLWFGAELIPDKWTVQ

SEQ ID NO: 7165 - protein, 20 aa, synthetic construct
  source 1..20: note = Seed: KEPPFLWMGYELHPDKWTVQ; note = HLAs: DRB1_0101 DRB1_0405 DRB1_1001 DPA10103-DPB10101 DPA10103-DPB10201 DPA10103-DPB10202 DPA10103-DPB10401 DPA10103-DPB10402 DPA10103-DPB10501 DPA10103-DPB110501 DPA10103-DPB112601 DPA10103-DPB11501 DPA10103-DPB11601 DPA10103-DPB11801 DPA10103-DPB11901 DPA10103-DPB12301 DPA10103-DPB13101 DPA10103-DPB13401 DPA10103-DPB13901 DPA10103-DPB14001 DPA10103-DPB14101 DPA10103-DPB14801 DPA10103-DPB14901 DPA10103-DPB15001 DPA10103-DPB15101 DPA10103-DPB15501 DPA10103-DPB15901 DPA10103-DPB18001 DPA10104-DPB10101 DPA10104-DPB11501 DPA10105-DPB10101 DPA10105-DPB10401 DPA10105-DPB11801 DPA10105-DPB15001 DPA10106-DPB10101 DPA10201-DPB10101 DPA10201-DPB10201 DPA10201-DPB10202 DPA10201-DPB10401 DPA10201-DPB10501 DPA10201-DPB110601 DPA10201-DPB11501 DPA10201-DPB11601 DPA10201-DPB11901 DPA10201-DPB13401 DPA10201-DPB15501 DPA10202-DPB10101 DPA10202-DPB10201 DPA10202-DPB10202 DPA10202-DPB10401 DPA10202-DPB10501 DPA10202-DPB110601 DPA10202-DPB11101 DPA10202-DPB11301 DPA10202-DPB11801 DPA10202-DPB11901; note = HLAs: DPA10202-DPB13101 DPA10202-DPB13801 DPA10202-DPB15501 DPA10202-DPB16501 DPA10301-DPB10101 DPA10301-DPB10201 DPA10301-DPB10202 DPA10301-DPB10401 DPA10301-DPB10402 DPA10301-DPB110501 DPA10301-DPB110601 DPA10301-DPB11101 DPA10301-DPB11301 DPA10301-DPB11801 DPA10301-DPB12301 DPA10301-DPB13901 DPA10301-DPB14001 DPA10301-DPB14901 DPA10301-DPB15501 DPA10301-DPB16501 DPA10301-DPB17501 DPA10301-DPB18001 DPA10401-DPB10101 DPA10401-DPB10201 DPA10401-DPB10202 DPA10401-DPB10402 DPA10401-DPB10501 DPA10401-DPB110501 DPA10401-DPB14901
KEPPFLWEGVELLPDKWTVQ

SEQ ID NO: 7166 - protein, 14 aa, synthetic construct
  source 1..14: note = Seed: PPFLWMGYELHPDK; note = HLAs: DRB1_1001 DPA10103-DPB11501 DPA10103-DPB13401 DPA10103-DPB14001 DPA10103-DPB15901 DPA10104-DPB11501 DPA10106-DPB10101 DPA10201-DPB10101 DPA10201-DPB110601 DPA10201-DPB11501 DPA10201-DPB11601 DPA10201-DPB11901 DPA10202-DPB10101 DPA10202-DPB10201 DPA10202-DPB10202 DPA10202-DPB10401 DPA10202-DPB110601 DPA10202-DPB11901 DPA10202-DPB13101 DPA10202-DPB16501 DPA10301-DPB10201 DPA10301-DPB10202 DPA10301-DPB10401 DPA10301-DPB10402 DPA10301-DPB110501 DPA10301-DPB11801 DPA10301-DPB12301 DPA10301-DPB13901 DPA10301-DPB14001 DPA10301-DPB14901 DPA10301-DPB15501 DPA10301-DPB17501 DPA10301-DPB18001 DPA10401-DPB10402 DPA10401-DPB110501 DPA10401-DPB14901
PPFLWIGSELLPDK

SEQ ID NO: 7167 - protein, 20 aa, synthetic construct
  source 1..20: note = Seed: KEPPFLWMGYELHPDKWTVQ; note = HLAs: DRB1_0101 DRB1_0405 DRB1_1001 DPA10103-DPB10201 DPA10103-DPB10202 DPA10103-DPB10401 DPA10103-DPB10402 DPA10103-DPB10501 DPA10103-DPB110501 DPA10103-DPB112601 DPA10103-DPB11501 DPA10103-DPB11601 DPA10103-DPB11801 DPA10103-DPB12301 DPA10103-DPB13401 DPA10103-DPB13901 DPA10103-DPB14001 DPA10103-DPB14101 DPA10103-DPB14801 DPA10103-DPB14901 DPA10103-DPB15101 DPA10103-DPB15501 DPA10103-DPB15901 DPA10103-DPB18001 DPA10104-DPB11501 DPA10105-DPB10401 DPA10105-DPB11801 DPA10106-DPB10101 DPA10201-DPB10101 DPA10201-DPB10201 DPA10201-DPB10202 DPA10201-DPB10401 DPA10201-DPB10501 DPA10201-DPB110601 DPA10201-DPB11501 DPA10201-DPB11601 DPA10201-DPB11901 DPA10201-DPB13401 DPA10201-DPB15501 DPA10202-DPB10101 DPA10202-DPB10201 DPA10202-DPB10202 DPA10202-DPB10401 DPA10202-DPB10501 DPA10202-DPB110601 DPA10202-DPB11301 DPA10202-DPB11801 DPA10202-DPB11901 DPA10202-DPB13101 DPA10202-DPB13801 DPA10202-DPB15501 DPA10202-DPB16501 DPA10301-DPB10101 DPA10301-DPB10201 DPA10301-DPB10202 DPA10301-DPB10401; note = HLAs: DPA10301-DPB10402 DPA10301-DPB110501 DPA10301-DPB110601 DPA10301-DPB11301 DPA10301-DPB11801 DPA10301-DPB12301 DPA10301-DPB13901 DPA10301-DPB14001 DPA10301-DPB14901 DPA10301-DPB15501 DPA10301-DPB17501 DPA10301-DPB18001 DPA10401-DPB10201 DPA10401-DPB10202 DPA10401-DPB10402 DPA10401-DPB110501 DPA10401-DPB14901
KEPPFLWFGVELLPDKWTVQ

SEQ ID NO: 7168 - protein, 20 aa, synthetic construct
  source 1..20: note = Seed: KEPPFLWMGYELHPDKWTVQ; note = HLAs: DPA10103-DPB10101 DPA10103-DPB10201 DPA10103-DPB10202 DPA10103-DPB10401 DPA10103-DPB10402 DPA10103-DPB10501 DPA10103-DPB110501 DPA10103-DPB112601 DPA10103-DPB11501 DPA10103-DPB11601 DPA10103-DPB11801 DPA10103-DPB11901 DPA10103-DPB12301 DPA10103-DPB13101 DPA10103-DPB13401 DPA10103-DPB13901 DPA10103-DPB14001 DPA10103-DPB14101 DPA10103-DPB14801 DPA10103-DPB14901 DPA10103-DPB15001 DPA10103-DPB15101 DPA10103-DPB15501 DPA10103-DPB15901 DPA10103-DPB18001 DPA10104-DPB10101 DPA10104-DPB11501 DPA10105-DPB10101 DPA10105-DPB10401 DPA10105-DPB11801 DPA10105-DPB15001 DPA10106-DPB10101 DPA10201-DPB10101 DPA10201-DPB10201 DPA10201-DPB10202 DPA10201-DPB10401 DPA10201-DPB10501 DPA10201-DPB110601 DPA10201-DPB11501 DPA10201-DPB11601 DPA10201-DPB11901 DPA10201-DPB13401 DPA10201-DPB15501 DPA10202-DPB10101 DPA10202-DPB10201 DPA10202-DPB10202 DPA10202-DPB10401 DPA10202-DPB10501 DPA10202-DPB110601 DPA10202-DPB11101 DPA10202-DPB11301 DPA10202-DPB11801 DPA10202-DPB11901 DPA10202-DPB13101 DPA10202-DPB13801; note = HLAs: DPA10202-DPB15501 DPA10202-DPB16501 DPA10301-DPB10101 DPA10301-DPB10201 DPA10301-DPB10202 DPA10301-DPB10401 DPA10301-DPB10402 DPA10301-DPB110501 DPA10301-DPB110601 DPA10301-DPB11101 DPA10301-DPB11301 DPA10301-DPB11801 DPA10301-DPB12301 DPA10301-DPB13901 DPA10301-DPB14001 DPA10301-DPB14901 DPA10301-DPB15501 DPA10301-DPB16501 DPA10301-DPB17501 DPA10301-DPB18001 DPA10401-DPB10101 DPA10401-DPB10201 DPA10401-DPB10202 DPA10401-DPB10402 DPA10401-DPB10501 DPA10401-DPB110501 DPA10401-DPB14901
KEPPLLWDGFELLPDKWTVQ

SEQ ID NO: 7169 - protein, 14 aa, synthetic construct
  source 1..14: note = Seed: PPFLWMGYELHPDK; note = HLAs: DPA10103-DPB10101 DPA10103-DPB10201 DPA10103-DPB10202 DPA10103-DPB10401 DPA10103-DPB112601 DPA10103-DPB11501 DPA10103-DPB11601 DPA10103-DPB11901 DPA10103-DPB12301 DPA10103-DPB13101 DPA10103-DPB13401 DPA10103-DPB13901 DPA10103-DPB14001 DPA10103-DPB14101 DPA10103-DPB14801 DPA10103-DPB15001 DPA10103-DPB15901 DPA10104-DPB10101 DPA10104-DPB11501 DPA10105-DPB10101 DPA10105-DPB10401 DPA10105-DPB15001 DPA10106-DPB10101 DPA10201-DPB10101 DPA10201-DPB110601 DPA10201-DPB11501 DPA10201-DPB11601 DPA10201-DPB11901 DPA10202-DPB10101 DPA10202-DPB10201 DPA10202-DPB10202 DPA10202-DPB10401 DPA10202-DPB110601 DPA10202-DPB11901 DPA10202-DPB13101 DPA10202-DPB16501 DPA10301-DPB10101 DPA10301-DPB10201 DPA10301-DPB10202 DPA10301-DPB10401 DPA10301-DPB10402 DPA10301-DPB110501 DPA10301-DPB110601 DPA10301-DPB11801 DPA10301-DPB12301 DPA10301-DPB13901 DPA10301-DPB14001 DPA10301-DPB14901 DPA10301-DPB15501 DPA10301-DPB16501 DPA10301-DPB17501 DPA10301-DPB18001 DPA10401-DPB10101 DPA10401-DPB10201; note = HLAs: DPA10401-DPB10202 DPA10401-DPB10402 DPA10401-DPB10501 DPA10401-DPB110501 DPA10401-DPB14901
PPYLWEGYELVPDK

SEQ ID NO: 7170 - protein, 20 aa, synthetic construct
  source 1..20: note = Seed: KEPPFLWMGYELHPDKWTVQ; note = HLAs: DRB1_0101 DRB1_1001 DPA10103-DPB10101 DPA10103-DPB10201 DPA10103-DPB10202 DPA10103-DPB10401 DPA10103-DPB10402 DPA10103-DPB10501 DPA10103-DPB110501 DPA10103-DPB112601 DPA10103-DPB11501 DPA10103-DPB11601 DPA10103-DPB11801 DPA10103-DPB11901 DPA10103-DPB12301 DPA10103-DPB13101 DPA10103-DPB13401 DPA10103-DPB13901 DPA10103-DPB14001 DPA10103-DPB14101 DPA10103-DPB14801 DPA10103-DPB14901 DPA10103-DPB15001 DPA10103-DPB15101 DPA10103-DPB15501 DPA10103-DPB15901 DPA10103-DPB18001 DPA10104-DPB10101 DPA10104-DPB11501 DPA10105-DPB10101 DPA10105-DPB10401 DPA10105-DPB11801 DPA10105-DPB15001 DPA10106-DPB10101 DPA10201-DPB10101 DPA10201-DPB10201 DPA10201-DPB10202 DPA10201-DPB10401 DPA10201-DPB10501 DPA10201-DPB110601 DPA10201-DPB11501 DPA10201-DPB11601 DPA10201-DPB11901 DPA10201-DPB13401 DPA10201-DPB15501 DPA10202-DPB10101 DPA10202-DPB10201 DPA10202-DPB10202 DPA10202-DPB10401 DPA10202-DPB10501 DPA10202-DPB110601 DPA10202-DPB11101 DPA10202-DPB11301 DPA10202-DPB11801 DPA10202-DPB11901; note = HLAs: DPA10202-DPB13101 DPA10202-DPB13801 DPA10202-DPB15501 DPA10202-DPB16501 DPA10301-DPB10101 DPA10301-DPB10201 DPA10301-DPB10202 DPA10301-DPB10401 DPA10301-DPB10402 DPA10301-DPB110501 DPA10301-DPB110601 DPA10301-DPB11101 DPA10301-DPB11301 DPA10301-DPB11801 DPA10301-DPB12301 DPA10301-DPB13901 DPA10301-DPB14001 DPA10301-DPB14901 DPA10301-DPB15501 DPA10301-DPB16501 DPA10301-DPB17501 DPA10301-DPB18001 DPA10401-DPB10101 DPA10401-DPB10201 DPA10401-DPB10202 DPA10401-DPB10402 DPA10401-DPB10501 DPA10401-DPB110501 DPA10401-DPB14901
KEPPLLWIGFELSPDKWTVQ

SEQ ID NO: 7171 - protein, 20 aa, synthetic construct
  source 1..20: note = Seed: KEPPFLWMGYELHPDKWTVQ; note = HLAs: DPA10103-DPB10101 DPA10103-DPB10201 DPA10103-DPB10202 DPA10103-DPB10401 DPA10103-DPB10402 DPA10103-DPB10501 DPA10103-DPB110501 DPA10103-DPB112601 DPA10103-DPB11501 DPA10103-DPB11601 DPA10103-DPB11801 DPA10103-DPB11901 DPA10103-DPB12301 DPA10103-DPB13101 DPA10103-DPB13401 DPA10103-DPB13901 DPA10103-DPB14001 DPA10103-DPB14101 DPA10103-DPB14801 DPA10103-DPB14901 DPA10103-DPB15001 DPA10103-DPB15101 DPA10103-DPB15501 DPA10103-DPB15901 DPA10103-DPB18001 DPA10104-DPB10101 DPA10104-DPB11501 DPA10105-DPB10101 DPA10105-DPB10401 DPA10105-DPB11801 DPA10105-DPB15001 DPA10106-DPB10101 DPA10201-DPB10101 DPA10201-DPB10201 DPA10201-DPB10202 DPA10201-DPB10401 DPA10201-DPB10501 DPA10201-DPB110601 DPA10201-DPB11501 DPA10201-DPB11601 DPA10201-DPB11901 DPA10201-DPB13401 DPA10201-DPB15501 DPA10202-DPB10101 DPA10202-DPB10201 DPA10202-DPB10202 DPA10202-DPB10401 DPA10202-DPB10501 DPA10202-DPB110601 DPA10202-DPB11301 DPA10202-DPB11801 DPA10202-DPB11901 DPA10202-DPB13101 DPA10202-DPB13801 DPA10202-DPB15501; note = HLAs: DPA10202-DPB16501 DPA10301-DPB10101 DPA10301-DPB10201 DPA10301-DPB10202 DPA10301-DPB10401 DPA10301-DPB10402 DPA10301-DPB110501 DPA10301-DPB110601 DPA10301-DPB11301 DPA10301-DPB11801 DPA10301-DPB12301 DPA10301-DPB13901 DPA10301-DPB14001 DPA10301-DPB14901 DPA10301-DPB15501 DPA10301-DPB16501 DPA10301-DPB17501 DPA10301-DPB18001 DPA10401-DPB10201 DPA10401-DPB10202 DPA10401-DPB10402 DPA10401-DPB10501 DPA10401-DPB110501 DPA10401-DPB14901
KEPPLLWHGLELLPDKWTVQ

SEQ ID NO: 7172 - protein, 20 aa, synthetic construct
  source 1..20: note = Seed: KEPPFLWMGYELHPDKWTVQ; note = HLAs: DPA10103-DPB10101 DPA10103-DPB10201 DPA10103-DPB10202 DPA10103-DPB10401 DPA10103-DPB10402 DPA10103-DPB10501 DPA10103-DPB110501 DPA10103-DPB112601 DPA10103-DPB11501 DPA10103-DPB11601 DPA10103-DPB11801 DPA10103-DPB11901 DPA10103-DPB12301 DPA10103-DPB13101 DPA10103-DPB13401 DPA10103-DPB13901 DPA10103-DPB14001 DPA10103-DPB14101 DPA10103-DPB14801 DPA10103-DPB14901 DPA10103-DPB15001 DPA10103-DPB15101 DPA10103-DPB15501 DPA10103-DPB15901 DPA10103-DPB18001 DPA10104-DPB10101 DPA10104-DPB11501 DPA10105-DPB10101 DPA10105-DPB10401 DPA10105-DPB11801 DPA10105-DPB15001 DPA10106-DPB10101 DPA10201-DPB10101 DPA10201-DPB10201 DPA10201-DPB10202 DPA10201-DPB10401 DPA10201-DPB10501 DPA10201-DPB110601 DPA10201-DPB11501 DPA10201-DPB11601 DPA10201-DPB11901 DPA10201-DPB13401 DPA10201-DPB15501 DPA10202-DPB10101 DPA10202-DPB10201 DPA10202-DPB10202 DPA10202-DPB10401 DPA10202-DPB10501 DPA10202-DPB110601 DPA10202-DPB11101 DPA10202-DPB11301 DPA10202-DPB11801 DPA10202-DPB11901 DPA10202-DPB13101 DPA10202-DPB13801; note = HLAs: DPA10202-DPB15501 DPA10202-DPB16501 DPA10301-DPB10101 DPA10301-DPB10201 DPA10301-DPB10202 DPA10301-DPB10401 DPA10301-DPB10402 DPA10301-DPB110501 DPA10301-DPB110601 DPA10301-DPB11101 DPA10301-DPB11301 DPA10301-DPB11801 DPA10301-DPB12301 DPA10301-DPB13901 DPA10301-DPB14001 DPA10301-DPB14901 DPA10301-DPB15501 DPA10301-DPB16501 DPA10301-DPB17501 DPA10301-DPB18001 DPA10401-DPB10101 DPA10401-DPB10201 DPA10401-DPB10202 DPA10401-DPB10402 DPA10401-DPB10501 DPA10401-DPB110501 DPA10401-DPB14901
KEPPILWSGFELEPDKWTVQ

SEQ ID NO: 7173 - protein, 20 aa, synthetic construct
  source 1..20: note = Seed: KEPPFLWMGYELHPDKWTVQ; note = HLAs: DRB1_0101 DRB1_1001 DPA10103-DPB10101 DPA10103-DPB10201 DPA10103-DPB10202 DPA10103-DPB10401 DPA10103-DPB10402 DPA10103-DPB10501 DPA10103-DPB110501 DPA10103-DPB112601 DPA10103-DPB11501 DPA10103-DPB11601 DPA10103-DPB11801 DPA10103-DPB11901 DPA10103-DPB12301 DPA10103-DPB13101 DPA10103-DPB13401 DPA10103-DPB13901 DPA10103-DPB14001 DPA10103-DPB14101 DPA10103-DPB14801 DPA10103-DPB14901 DPA10103-DPB15001 DPA10103-DPB15101 DPA10103-DPB15501 DPA10103-DPB15901 DPA10103-DPB18001 DPA10104-DPB10101 DPA10104-DPB11501 DPA10105-DPB10101 DPA10105-DPB10401 DPA10105-DPB11801 DPA10105-DPB15001 DPA10106-DPB10101 DPA10201-DPB10101 DPA10201-DPB10201 DPA10201-DPB10202 DPA10201-DPB10401 DPA10201-DPB10501 DPA10201-DPB110601 DPA10201-DPB11501 DPA10201-DPB11601 DPA10201-DPB11901 DPA10201-DPB13401 DPA10201-DPB15501 DPA10202-DPB10101 DPA10202-DPB10201 DPA10202-DPB10202 DPA10202-DPB10401 DPA10202-DPB10501 DPA10202-DPB110601 DPA10202-DPB11101 DPA10202-DPB11301 DPA10202-DPB11801 DPA10202-DPB11901; note = HLAs: DPA10202-DPB13101 DPA10202-DPB13801 DPA10202-DPB15501 DPA10202-DPB16501 DPA10301-DPB10101 DPA10301-DPB10201 DPA10301-DPB10202 DPA10301-DPB10401 DPA10301-DPB10402 DPA10301-DPB110501 DPA10301-DPB110601 DPA10301-DPB11101 DPA10301-DPB11301 DPA10301-DPB11801 DPA10301-DPB12301 DPA10301-DPB13901 DPA10301-DPB14001 DPA10301-DPB14901 DPA10301-DPB15501 DPA10301-DPB16501 DPA10301-DPB17501 DPA10301-DPB18001 DPA10401-DPB10101 DPA10401-DPB10201 DPA10401-DPB10202 DPA10401-DPB10402 DPA10401-DPB10501 DPA10401-DPB110501 DPA10401-DPB14901
KEPPYLWSGIELLPDKWTVQ

SEQ ID NO: 7174 - protein, 20 aa, synthetic construct
  source 1..20: note = Seed: KEPPFLWMGYELHPDKWTVQ; note = HLAs: DRB1_0101 DPA10103-DPB10101 DPA10103-DPB10201 DPA10103-DPB10202 DPA10103-DPB10401 DPA10103-DPB10402 DPA10103-DPB10501 DPA10103-DPB110501 DPA10103-DPB112601 DPA10103-DPB11501 DPA10103-DPB11601 DPA10103-DPB11801 DPA10103-DPB11901 DPA10103-DPB12301 DPA10103-DPB13101 DPA10103-DPB13401 DPA10103-DPB13901 DPA10103-DPB14001 DPA10103-DPB14101 DPA10103-DPB14801 DPA10103-DPB14901 DPA10103-DPB15001 DPA10103-DPB15101 DPA10103-DPB15501 DPA10103-DPB15901 DPA10103-DPB18001 DPA10104-DPB10101 DPA10104-DPB11501 DPA10105-DPB10101 DPA10105-DPB10401 DPA10105-DPB11801 DPA10105-DPB15001 DPA10106-DPB10101 DPA10201-DPB10101 DPA10201-DPB10201 DPA10201-DPB10202 DPA10201-DPB10401 DPA10201-DPB10501 DPA10201-DPB110601 DPA10201-DPB11501 DPA10201-DPB11601 DPA10201-DPB11901 DPA10201-DPB13401 DPA10201-DPB15501 DPA10202-DPB10101 DPA10202-DPB10201 DPA10202-DPB10202 DPA10202-DPB10401 DPA10202-DPB10501 DPA10202-DPB110601 DPA10202-DPB11101 DPA10202-DPB11301 DPA10202-DPB11801 DPA10202-DPB11901 DPA10202-DPB13101; note = HLAs: DPA10202-DPB13801 DPA10202-DPB15501 DPA10202-DPB16501 DPA10301-DPB10101 DPA10301-DPB10201 DPA10301-DPB10202 DPA10301-DPB10401 DPA10301-DPB10402 DPA10301-DPB110501 DPA10301-DPB110601 DPA10301-DPB11101 DPA10301-DPB11301 DPA10301-DPB11801 DPA10301-DPB12301 DPA10301-DPB13901 DPA10301-DPB14001 DPA10301-DPB14901 DPA10301-DPB15501 DPA10301-DPB16501 DPA10301-DPB17501 DPA10301-DPB18001 DPA10401-DPB10101 DPA10401-DPB10201 DPA10401-DPB10202 DPA10401-DPB10402 DPA10401-DPB10501 DPA10401-DPB110501 DPA10401-DPB14901
KEPPFLWSGMELMPDKWTVQ

SEQ ID NO: 7175 - protein, 14 aa, synthetic construct
  source 1..14: note = Seed: PPFLWMGYELHPDK; note = HLAs: DPA10103-DPB10101 DPA10103-DPB10201 DPA10103-DPB10202 DPA10103-DPB10401 DPA10103-DPB112601 DPA10103-DPB11501 DPA10103-DPB11601 DPA10103-DPB11901 DPA10103-DPB12301 DPA10103-DPB13101 DPA10103-DPB13401 DPA10103-DPB13901 DPA10103-DPB14001 DPA10103-DPB14101 DPA10103-DPB14801 DPA10103-DPB15001 DPA10103-DPB15901 DPA10104-DPB10101 DPA10104-DPB11501 DPA10105-DPB10101 DPA10105-DPB10401 DPA10105-DPB15001 DPA10106-DPB10101 DPA10201-DPB10101 DPA10201-DPB110601 DPA10201-DPB11501 DPA10201-DPB11601 DPA10201-DPB11901 DPA10202-DPB10101 DPA10202-DPB10201 DPA10202-DPB10202 DPA10202-DPB10401 DPA10202-DPB110601 DPA10202-DPB11901 DPA10202-DPB13101 DPA10202-DPB16501 DPA10301-DPB10101 DPA10301-DPB10201 DPA10301-DPB10202 DPA10301-DPB10401 DPA10301-DPB10402 DPA10301-DPB110501 DPA10301-DPB110601 DPA10301-DPB11801 DPA10301-DPB12301 DPA10301-DPB13901 DPA10301-DPB14001 DPA10301-DPB14901 DPA10301-DPB15501 DPA10301-DPB16501 DPA10301-DPB17501 DPA10301-DPB18001 DPA10401-DPB10101 DPA10401-DPB10201; note = HLAs: DPA10401-DPB10202 DPA10401-DPB10402 DPA10401-DPB10501 DPA10401-DPB110501 DPA10401-DPB14901
PPYLWSGFELEPDK

SEQ ID NO: 7176 - protein, 20 aa, synthetic construct
  source 1..20: note = Seed: KEPPFLWMGYELHPDKWTVQ; note = HLAs: DPA10103-DPB10101 DPA10103-DPB10201 DPA10103-DPB10202 DPA10103-DPB10401 DPA10103-DPB10402 DPA10103-DPB10501 DPA10103-DPB110501 DPA10103-DPB112601 DPA10103-DPB11501 DPA10103-DPB11601 DPA10103-DPB11801 DPA10103-DPB11901 DPA10103-DPB12301 DPA10103-DPB13101 DPA10103-DPB13401 DPA10103-DPB13901 DPA10103-DPB14001 DPA10103-DPB14101 DPA10103-DPB14801 DPA10103-DPB14901 DPA10103-DPB15001 DPA10103-DPB15101 DPA10103-DPB15501 DPA10103-DPB15901 DPA10103-DPB18001 DPA10104-DPB10101 DPA10104-DPB11501 DPA10105-DPB10101 DPA10105-DPB10401 DPA10105-DPB11801 DPA10105-DPB15001 DPA10106-DPB10101 DPA10201-DPB10101 DPA10201-DPB10201 DPA10201-DPB10202 DPA10201-DPB10401 DPA10201-DPB10501 DPA10201-DPB110601 DPA10201-DPB11501 DPA10201-DPB11601 DPA10201-DPB11901 DPA10201-DPB13401 DPA10201-DPB15501 DPA10202-DPB10101 DPA10202-DPB10201 DPA10202-DPB10202 DPA10202-DPB10401 DPA10202-DPB10501 DPA10202-DPB110601 DPA10202-DPB11301 DPA10202-DPB11901 DPA10202-DPB13101 DPA10202-DPB13801 DPA10202-DPB15501 DPA10202-DPB16501; note = HLAs: DPA10301-DPB10101 DPA10301-DPB10201 DPA10301-DPB10202 DPA10301-DPB10401 DPA10301-DPB10402 DPA10301-DPB110501 DPA10301-DPB110601 DPA10301-DPB11101 DPA10301-DPB11301 DPA10301-DPB11801 DPA10301-DPB12301 DPA10301-DPB13901 DPA10301-DPB14001 DPA10301-DPB14901 DPA10301-DPB15501 DPA10301-DPB16501 DPA10301-DPB17501 DPA10301-DPB18001 DPA10401-DPB10101 DPA10401-DPB10201 DPA10401-DPB10202 DPA10401-DPB10402 DPA10401-DPB10501 DPA10401-DPB110501 DPA10401-DPB14901
KEPPWLWDGFELVPDKWTVQ

SEQ ID NO: 7177 - protein, 20 aa, synthetic construct
  source 1..20: note = Seed: KEPPFLWMGYELHPDKWTVQ; note = HLAs: DPA10103-DPB10101 DPA10103-DPB10201 DPA10103-DPB10202 DPA10103-DPB10401 DPA10103-DPB10402 DPA10103-DPB10501 DPA10103-DPB110501 DPA10103-DPB112601 DPA10103-DPB11501 DPA10103-DPB11601 DPA10103-DPB11801 DPA10103-DPB11901 DPA10103-DPB12301 DPA10103-DPB13101 DPA10103-DPB13401 DPA10103-DPB13901 DPA10103-DPB14001 DPA10103-DPB14101 DPA10103-DPB14801 DPA10103-DPB14901 DPA10103-DPB15001 DPA10103-DPB15101 DPA10103-DPB15501 DPA10103-DPB15901 DPA10103-DPB18001 DPA10104-DPB10101 DPA10104-DPB11501 DPA10105-DPB10101 DPA10105-DPB10401 DPA10105-DPB11801 DPA10105-DPB15001 DPA10106-DPB10101 DPA10201-DPB10101 DPA10201-DPB10201 DPA10201-DPB10202 DPA10201-DPB10401 DPA10201-DPB10501 DPA10201-DPB110601 DPA10201-DPB11501 DPA10201-DPB11601 DPA10201-DPB11901 DPA10201-DPB13401 DPA10201-DPB15501 DPA10202-DPB10101 DPA10202-DPB10201 DPA10202-DPB10202 DPA10202-DPB10401 DPA10202-DPB10501 DPA10202-DPB110601 DPA10202-DPB11101 DPA10202-DPB11301 DPA10202-DPB11801 DPA10202-DPB11901 DPA10202-DPB13101 DPA10202-DPB13801; note = HLAs: DPA10202-DPB15501 DPA10202-DPB16501 DPA10301-DPB10101 DPA10301-DPB10201 DPA10301-DPB10202 DPA10301-DPB10401 DPA10301-DPB10402 DPA10301-DPB110501 DPA10301-DPB110601 DPA10301-DPB11101 DPA10301-DPB11301 DPA10301-DPB11801 DPA10301-DPB12301 DPA10301-DPB13901 DPA10301-DPB14001 DPA10301-DPB14901 DPA10301-DPB15501 DPA10301-DPB16501 DPA10301-DPB17501 DPA10301-DPB18001 DPA10401-DPB10101 DPA10401-DPB10201 DPA10401-DPB10202 DPA10401-DPB10402 DPA10401-DPB10501 DPA10401-DPB110501 DPA10401-DPB14901
KEPPFLWEGFELRPDKWTVQ

SEQ ID NO: 7178 - protein, 20 aa, synthetic construct
  source 1..20: note = Seed: KEPPFLWMGYELHPDKWTVQ; note = HLAs: DPA10103-DPB10101 DPA10103-DPB10201 DPA10103-DPB10202 DPA10103-DPB10401 DPA10103-DPB10402 DPA10103-DPB10501 DPA10103-DPB110501 DPA10103-DPB112601 DPA10103-DPB11601 DPA10103-DPB11801 DPA10103-DPB11901 DPA10103-DPB12301 DPA10103-DPB13101 DPA10103-DPB13401 DPA10103-DPB13901 DPA10103-DPB14001 DPA10103-DPB14101 DPA10103-DPB14801 DPA10103-DPB14901 DPA10103-DPB15001 DPA10103-DPB15101 DPA10103-DPB15501 DPA10103-DPB15901 DPA10103-DPB18001 DPA10104-DPB10101 DPA10105-DPB10101 DPA10105-DPB10401 DPA10105-DPB11801 DPA10105-DPB15001 DPA10106-DPB10101 DPA10201-DPB10101 DPA10201-DPB10201 DPA10201-DPB10202 DPA10201-DPB10401 DPA10201-DPB10501 DPA10201-DPB110601 DPA10201-DPB11501 DPA10201-DPB11601 DPA10201-DPB11901 DPA10201-DPB13401 DPA10201-DPB15501 DPA10202-DPB10101 DPA10202-DPB10201 DPA10202-DPB10202 DPA10202-DPB10401 DPA10202-DPB10501 DPA10202-DPB110601 DPA10202-DPB11101 DPA10202-DPB11301 DPA10202-DPB11801 DPA10202-DPB11901 DPA10202-DPB13101 DPA10202-DPB13801 DPA10202-DPB15501 DPA10202-DPB16501; note = HLAs: DPA10301-DPB10101 DPA10301-DPB10201 DPA10301-DPB10202 DPA10301-DPB10402 DPA10301-DPB110501 DPA10301-DPB110601 DPA10301-DPB11101 DPA10301-DPB11301 DPA10301-DPB14901 DPA10301-DPB15501 DPA10301-DPB16501 DPA10301-DPB17501 DPA10301-DPB18001 DPA10401-DPB10101 DPA10401-DPB10201 DPA10401-DPB10202 DPA10401-DPB10402 DPA10401-DPB10501 DPA10401-DPB110501 DPA10401-DPB14901
KEPPRLWSGFELLPDKWTVQ

SEQ ID NO: 7179 - protein, 20 aa, synthetic construct
  source 1..20: note = Seed: KEPPFLWMGYELHPDKWTVQ; note = HLAs: DRB1_0101 DPA10103-DPB10101 DPA10103-DPB10201 DPA10103-DPB10202 DPA10103-DPB10401 DPA10103-DPB10402 DPA10103-DPB10501 DPA10103-DPB110501 DPA10103-DPB112601 DPA10103-DPB11501 DPA10103-DPB11601 DPA10103-DPB11801 DPA10103-DPB11901 DPA10103-DPB12301 DPA10103-DPB13101 DPA10103-DPB13401 DPA10103-DPB13901 DPA10103-DPB14001 DPA10103-DPB14101 DPA10103-DPB14801 DPA10103-DPB14901 DPA10103-DPB15001 DPA10103-DPB15101 DPA10103-DPB15501 DPA10103-DPB15901 DPA10103-DPB18001 DPA10104-DPB10101 DPA10104-DPB11501 DPA10105-DPB10101 DPA10105-DPB10401 DPA10105-DPB11801 DPA10105-DPB15001 DPA10106-DPB10101 DPA10201-DPB10101 DPA10201-DPB10201 DPA10201-DPB10202 DPA10201-DPB10401 DPA10201-DPB10501 DPA10201-DPB110601 DPA10201-DPB11501 DPA10201-DPB11601 DPA10201-DPB11901 DPA10201-DPB13401 DPA10201-DPB15501 DPA10202-DPB10101 DPA10202-DPB10201 DPA10202-DPB10202 DPA10202-DPB10401 DPA10202-DPB10501 DPA10202-DPB110601 DPA10202-DPB11101 DPA10202-DPB11301 DPA10202-DPB11801 DPA10202-DPB11901 DPA10202-DPB13101; note = HLAs: DPA10202-DPB13801 DPA10202-DPB15501 DPA10202-DPB16501 DPA10301-DPB10101 DPA10301-DPB10201 DPA10301-DPB10202 DPA10301-DPB10401 DPA10301-DPB10402 DPA10301-DPB110501 DPA10301-DPB110601 DPA10301-DPB11101 DPA10301-DPB11301 DPA10301-DPB11801 DPA10301-DPB12301 DPA10301-DPB13901 DPA10301-DPB14001 DPA10301-DPB14901 DPA10301-DPB15501 DPA10301-DPB16501 DPA10301-DPB17501 DPA10301-DPB18001 DPA10401-DPB10101 DPA10401-DPB10201 DPA10401-DPB10202 DPA10401-DPB10402 DPA10401-DPB10501 DPA10401-DPB110501 DPA10401-DPB14901
KEPPFLWNGLELFPDKWTVQ

SEQ ID NO: 7180 - protein, 14 aa, synthetic construct
  source 1..14: note = Seed: PPFLWMGYELHPDK; note = HLAs: DPA10103-DPB10101 DPA10103-DPB10201 DPA10103-DPB10202 DPA10103-DPB10401 DPA10103-DPB112601 DPA10103-DPB11501 DPA10103-DPB11601 DPA10103-DPB11901 DPA10103-DPB12301 DPA10103-DPB13101 DPA10103-DPB13401 DPA10103-DPB13901 DPA10103-DPB14001 DPA10103-DPB14101 DPA10103-DPB14801 DPA10103-DPB15001 DPA10103-DPB15901 DPA10104-DPB10101 DPA10104-DPB11501 DPA10105-DPB10101 DPA10105-DPB10401 DPA10105-DPB15001 DPA10106-DPB10101 DPA10201-DPB10101 DPA10201-DPB110601 DPA10201-DPB11501 DPA10201-DPB11601 DPA10201-DPB11901 DPA10202-DPB10101 DPA10202-DPB10201 DPA10202-DPB10202 DPA10202-DPB10401 DPA10202-DPB110601 DPA10202-DPB11901 DPA10202-DPB13101 DPA10202-DPB16501 DPA10301-DPB10101 DPA10301-DPB10201 DPA10301-DPB10202 DPA10301-DPB10401 DPA10301-DPB10402 DPA10301-DPB110501 DPA10301-DPB110601 DPA10301-DPB11801 DPA10301-DPB12301 DPA10301-DPB13901 DPA10301-DPB14001 DPA10301-DPB14901 DPA10301-DPB15501 DPA10301-DPB16501 DPA10301-DPB17501 DPA10301-DPB18001 DPA10401-DPB10101 DPA10401-DPB10201; note = HLAs: DPA10401-DPB10202 DPA10401-DPB10402 DPA10401-DPB10501 DPA10401-DPB110501 DPA10401-DPB14901
PPWLWSGFELNPDK

SEQ ID NO: 7181 - protein, 20 aa, synthetic construct
  source 1..20: note = Seed: KEPPFLWMGYELHPDKWTVQ; note = HLAs: DRB1_0101 DPA10103-DPB10101 DPA10103-DPB10201 DPA10103-DPB10202 DPA10103-DPB10401 DPA10103-DPB10402 DPA10103-DPB10501 DPA10103-DPB110501 DPA10103-DPB112601 DPA10103-DPB11501 DPA10103-DPB11601 DPA10103-DPB11801 DPA10103-DPB11901 DPA10103-DPB12301 DPA10103-DPB13101 DPA10103-DPB13401 DPA10103-DPB13901 DPA10103-DPB14001 DPA10103-DPB14101 DPA10103-DPB14801 DPA10103-DPB14901 DPA10103-DPB15001 DPA10103-DPB15101 DPA10103-DPB15501 DPA10103-DPB15901 DPA10103-DPB18001 DPA10104-DPB10101 DPA10104-DPB11501 DPA10105-DPB10101 DPA10105-DPB10401 DPA10105-DPB11801 DPA10105-DPB15001 DPA10106-DPB10101 DPA10201-DPB10101 DPA10201-DPB10201 DPA10201-DPB10202 DPA10201-DPB10401 DPA10201-DPB10501 DPA10201-DPB110601 DPA10201-DPB11501 DPA10201-DPB11601 DPA10201-DPB11901 DPA10201-DPB13401 DPA10201-DPB15501 DPA10202-DPB10101 DPA10202-DPB10201 DPA10202-DPB10202 DPA10202-DPB10401 DPA10202-DPB10501 DPA10202-DPB110601 DPA10202-DPB11101 DPA10202-DPB11301 DPA10202-DPB11801 DPA10202-DPB11901 DPA10202-DPB13101; note = HLAs: DPA10202-DPB13801 DPA10202-DPB15501 DPA10202-DPB16501 DPA10301-DPB10101 DPA10301-DPB10201 DPA10301-DPB10202 DPA10301-DPB10401 DPA10301-DPB10402 DPA10301-DPB110501 DPA10301-DPB110601 DPA10301-DPB11101 DPA10301-DPB11301 DPA10301-DPB11801 DPA10301-DPB12301 DPA10301-DPB13901 DPA10301-DPB14001 DPA10301-DPB14901 DPA10301-DPB15501 DPA10301-DPB16501 DPA10301-DPB17501 DPA10301-DPB18001 DPA10401-DPB10101 DPA10401-DPB10201 DPA10401-DPB10202 DPA10401-DPB10402 DPA10401-DPB10501 DPA10401-DPB110501 DPA10401-DPB14901
KEPPWLWIGYELIPDKWTVQ

SEQ ID NO: 7182 - protein, 20 aa, synthetic construct
  source 1..20: note = Seed: KEPPFLWMGYELHPDKWTVQ; note = HLAs: DRB1_0101 DRB1_0405 DRB1_1001 DPA10103-DPB10101 DPA10103-DPB10201 DPA10103-DPB10202 DPA10103-DPB10401 DPA10103-DPB10402 DPA10103-DPB10501 DPA10103-DPB110501 DPA10103-DPB112601 DPA10103-DPB11501 DPA10103-DPB11601 DPA10103-DPB11801 DPA10103-DPB11901 DPA10103-DPB12301 DPA10103-DPB13101 DPA10103-DPB13401 DPA10103-DPB13901 DPA10103-DPB14001 DPA10103-DPB14101 DPA10103-DPB14801 DPA10103-DPB14901 DPA10103-DPB15001 DPA10103-DPB15101 DPA10103-DPB15501 DPA10103-DPB15901 DPA10103-DPB18001 DPA10104-DPB10101 DPA10104-DPB11501 DPA10105-DPB10101 DPA10105-DPB10401 DPA10105-DPB11801 DPA10105-DPB15001 DPA10106-DPB10101 DPA10201-DPB10101 DPA10201-DPB10201 DPA10201-DPB10202 DPA10201-DPB10401 DPA10201-DPB10501 DPA10201-DPB110601 DPA10201-DPB11501 DPA10201-DPB11601 DPA10201-DPB11901 DPA10201-DPB13401 DPA10201-DPB15501 DPA10202-DPB10101 DPA10202-DPB10201 DPA10202-DPB10202 DPA10202-DPB10401 DPA10202-DPB10501 DPA10202-DPB110601 DPA10202-DPB11101 DPA10202-DPB11301 DPA10202-DPB11801 DPA10202-DPB11901; note = HLAs: DPA10202-DPB13101 DPA10202-DPB13801 DPA10202-DPB15501 DPA10202-DPB16501 DPA10301-DPB10101 DPA10301-DPB10201 DPA10301-DPB10202 DPA10301-DPB10401 DPA10301-DPB10402 DPA10301-DPB110501 DPA10301-DPB110601 DPA10301-DPB11101 DPA10301-DPB11301 DPA10301-DPB11801 DPA10301-DPB12301 DPA10301-DPB13901 DPA10301-DPB14001 DPA10301-DPB14901 DPA10301-DPB15501 DPA10301-DPB16501 DPA10301-DPB17501 DPA10301-DPB18001 DPA10401-DPB10101 DPA10401-DPB10201 DPA10401-DPB10202 DPA10401-DPB10402 DPA10401-DPB10501 DPA10401-DPB110501 DPA10401-DPB14901
KEPPFLWSGAELIPDKWTVQ

SEQ ID NO: 7183 - protein, 14 aa, synthetic construct
  source 1..14: note = Seed: PPFLWMGYELHPDK; note = HLAs: DRB1_1001 DPA10103-DPB10101 DPA10103-DPB10201 DPA10103-DPB10202 DPA10103-DPB10401 DPA10103-DPB112601 DPA10103-DPB11501 DPA10103-DPB11601 DPA10103-DPB11901 DPA10103-DPB12301 DPA10103-DPB13101 DPA10103-DPB13401 DPA10103-DPB13901 DPA10103-DPB14001 DPA10103-DPB14101 DPA10103-DPB14801 DPA10103-DPB15001 DPA10103-DPB15901 DPA10104-DPB10101 DPA10104-DPB11501 DPA10105-DPB10101 DPA10105-DPB10401 DPA10105-DPB15001 DPA10106-DPB10101 DPA10201-DPB10101 DPA10201-DPB110601 DPA10201-DPB11501 DPA10201-DPB11601 DPA10201-DPB11901 DPA10202-DPB10101 DPA10202-DPB10201 DPA10202-DPB10202 DPA10202-DPB10401 DPA10202-DPB110601 DPA10202-DPB11901 DPA10202-DPB13101 DPA10202-DPB16501 DPA10301-DPB10101 DPA10301-DPB10201 DPA10301-DPB10202 DPA10301-DPB10401 DPA10301-DPB10402 DPA10301-DPB110501 DPA10301-DPB110601 DPA10301-DPB11801 DPA10301-DPB12301 DPA10301-DPB13901 DPA10301-DPB14001 DPA10301-DPB14901 DPA10301-DPB15501 DPA10301-DPB16501 DPA10301-DPB17501 DPA10301-DPB18001 DPA10401-DPB10101 DPA10401-DPB10201; note = HLAs: DPA10401-DPB10202 DPA10401-DPB10402 DPA10401-DPB10501 DPA10401-DPB110501 DPA10401-DPB14901
PPFLWVGWELTPDK

SEQ ID NO: 7184 - protein, 14 aa, synthetic construct
  source 1..14: note = Seed: PPFLWMGYELHPDK; note = HLAs: DPA10103-DPB10101 DPA10103-DPB10201 DPA10103-DPB10202 DPA10103-DPB10401 DPA10103-DPB112601 DPA10103-DPB11501 DPA10103-DPB11601 DPA10103-DPB11901 DPA10103-DPB12301 DPA10103-DPB13101 DPA10103-DPB13401 DPA10103-DPB13901 DPA10103-DPB14001 DPA10103-DPB14101 DPA10103-DPB14801 DPA10103-DPB15001 DPA10103-DPB15901 DPA10104-DPB10101 DPA10104-DPB11501 DPA10105-DPB10101 DPA10105-DPB10401 DPA10105-DPB15001 DPA10106-DPB10101 DPA10201-DPB10101 DPA10201-DPB110601 DPA10201-DPB11501 DPA10201-DPB11601 DPA10201-DPB11901 DPA10202-DPB10101 DPA10202-DPB10201 DPA10202-DPB10202 DPA10202-DPB10401 DPA10202-DPB110601 DPA10202-DPB11901 DPA10202-DPB13101 DPA10202-DPB16501 DPA10301-DPB10101 DPA10301-DPB10201 DPA10301-DPB10202 DPA10301-DPB10401 DPA10301-DPB10402 DPA10301-DPB110501 DPA10301-DPB110601 DPA10301-DPB11801 DPA10301-DPB12301 DPA10301-DPB13901 DPA10301-DPB14001 DPA10301-DPB14901 DPA10301-DPB16501 DPA10301-DPB17501 DPA10301-DPB18001 DPA10401-DPB10101 DPA10401-DPB10201 DPA10401-DPB10202; note = HLAs: DPA10401-DPB10402 DPA10401-DPB10501 DPA10401-DPB110501 DPA10401-DPB14901
PPVLWHGFELFPDK

SEQ ID NO: 7185 - protein, 20 aa, synthetic construct
  source 1..20: note = Seed: KEPPFLWMGYELHPDKWTVQ; note = HLAs: DPA10103-DPB10101 DPA10103-DPB10201 DPA10103-DPB10202 DPA10103-DPB10401 DPA10103-DPB10402 DPA10103-DPB10501 DPA10103-DPB110501 DPA10103-DPB112601 DPA10103-DPB11501 DPA10103-DPB11601 DPA10103-DPB11801 DPA10103-DPB11901 DPA10103-DPB12301 DPA10103-DPB13101 DPA10103-DPB13401 DPA10103-DPB13901 DPA10103-DPB14001 DPA10103-DPB14101 DPA10103-DPB14801 DPA10103-DPB14901 DPA10103-DPB15101 DPA10103-DPB15901 DPA10103-DPB18001 DPA10104-DPB10101 DPA10104-DPB11501 DPA10105-DPB10101 DPA10105-DPB10401 DPA10105-DPB11801 DPA10106-DPB10101 DPA10201-DPB10101 DPA10201-DPB10201 DPA10201-DPB10202 DPA10201-DPB10401 DPA10201-DPB10501 DPA10201-DPB110601 DPA10201-DPB11501 DPA10201-DPB11601 DPA10201-DPB11901 DPA10201-DPB13401 DPA10201-DPB15501 DPA10202-DPB10201 DPA10202-DPB10202 DPA10202-DPB10401 DPA10202-DPB10501 DPA10202-DPB110601 DPA10202-DPB11801 DPA10202-DPB11901 DPA10202-DPB13101 DPA10202-DPB13801 DPA10301-DPB10201 DPA10301-DPB10202 DPA10301-DPB10402 DPA10301-DPB110501 DPA10301-DPB110601; note = HLAs: DPA10301-DPB11801 DPA10301-DPB14001 DPA10301-DPB14901 DPA10301-DPB16501 DPA10301-DPB17501 DPA10301-DPB18001 DPA10401-DPB10101 DPA10401-DPB10201 DPA10401-DPB10202 DPA10401-DPB10402 DPA10401-DPB10501 DPA10401-DPB110501 DPA10401-DPB14901
KEPPLLWRGFELLPDKWTVQ

SEQ ID NO: 7186 - protein, 20 aa, synthetic construct
  source 1..20: note = Seed: KEPPFLWMGYELHPDKWTVQ; note = HLAs: DPA10103-DPB10101 DPA10103-DPB10201 DPA10103-DPB10202 DPA10103-DPB10401 DPA10103-DPB10402 DPA10103-DPB10501 DPA10103-DPB110501 DPA10103-DPB112601 DPA10103-DPB11501 DPA10103-DPB11601 DPA10103-DPB11801 DPA10103-DPB11901 DPA10103-DPB12301 DPA10103-DPB13101 DPA10103-DPB13401 DPA10103-DPB13901 DPA10103-DPB14001 DPA10103-DPB14101 DPA10103-DPB14801 DPA10103-DPB14901 DPA10103-DPB15001 DPA10103-DPB15101 DPA10103-DPB15501 DPA10103-DPB15901 DPA10103-DPB18001 DPA10104-DPB10101 DPA10104-DPB11501 DPA10105-DPB10101 DPA10105-DPB10401 DPA10105-DPB11801 DPA10105-DPB15001 DPA10106-DPB10101 DPA10201-DPB10101 DPA10201-DPB10201 DPA10201-DPB10202 DPA10201-DPB10401 DPA10201-DPB10501 DPA10201-DPB110601 DPA10201-DPB11501 DPA10201-DPB11601 DPA10201-DPB11901 DPA10201-DPB13401 DPA10201-DPB15501 DPA10202-DPB10101 DPA10202-DPB10201 DPA10202-DPB10202 DPA10202-DPB10401 DPA10202-DPB10501 DPA10202-DPB110601 DPA10202-DPB11101 DPA10202-DPB11301 DPA10202-DPB11801 DPA10202-DPB11901 DPA10202-DPB13101 DPA10202-DPB13801; note = HLAs: DPA10202-DPB15501 DPA10202-DPB16501 DPA10301-DPB10101 DPA10301-DPB10201 DPA10301-DPB10202 DPA10301-DPB10401 DPA10301-DPB10402 DPA10301-DPB110501 DPA10301-DPB110601 DPA10301-DPB11101 DPA10301-DPB11301 DPA10301-DPB11801 DPA10301-DPB12301 DPA10301-DPB13901 DPA10301-DPB14001 DPA10301-DPB14901 DPA10301-DPB15501 DPA10301-DPB16501 DPA10301-DPB17501 DPA10301-DPB18001 DPA10401-DPB10101 DPA10401-DPB10201 DPA10401-DPB10202 DPA10401-DPB10402 DPA10401-DPB10501 DPA10401-DPB110501 DPA10401-DPB14901
KEPPILWDGFELVPDKWTVQ

SEQ ID NO: 7187 - protein, 20 aa, synthetic construct
  source 1..20: note = Seed: KEPPFLWMGYELHPDKWTVQ; note = HLAs: DPA10103-DPB10101 DPA10103-DPB10201 DPA10103-DPB10202 DPA10103-DPB10401 DPA10103-DPB10402 DPA10103-DPB10501 DPA10103-DPB110501 DPA10103-DPB112601 DPA10103-DPB11501 DPA10103-DPB11601 DPA10103-DPB11801 DPA10103-DPB11901 DPA10103-DPB12301 DPA10103-DPB13101 DPA10103-DPB13401 DPA10103-DPB13901 DPA10103-DPB14001 DPA10103-DPB14101 DPA10103-DPB14801 DPA10103-DPB14901 DPA10103-DPB15001 DPA10103-DPB15101 DPA10103-DPB15501 DPA10103-DPB15901 DPA10103-DPB18001 DPA10104-DPB10101 DPA10104-DPB11501 DPA10105-DPB10101 DPA10105-DPB10401 DPA10105-DPB11801 DPA10105-DPB15001 DPA10106-DPB10101 DPA10201-DPB10101 DPA10201-DPB10201 DPA10201-DPB10202 DPA10201-DPB10401 DPA10201-DPB10501 DPA10201-DPB110601 DPA10201-DPB11501 DPA10201-DPB11601 DPA10201-DPB11901 DPA10201-DPB13401 DPA10201-DPB15501 DPA10202-DPB10101 DPA10202-DPB10201 DPA10202-DPB10202 DPA10202-DPB10401 DPA10202-DPB10501 DPA10202-DPB110601 DPA10202-DPB11101 DPA10202-DPB11301 DPA10202-DPB11801 DPA10202-DPB11901 DPA10202-DPB13101 DPA10202-DPB13801; note = HLAs: DPA10202-DPB15501 DPA10202-DPB16501 DPA10301-DPB10101 DPA10301-DPB10201 DPA10301-DPB10202 DPA10301-DPB10402 DPA10301-DPB110501 DPA10301-DPB110601 DPA10301-DPB11101 DPA10301-DPB11301 DPA10301-DPB14001 DPA10301-DPB14901 DPA10301-DPB15501 DPA10301-DPB16501 DPA10301-DPB17501 DPA10301-DPB18001 DPA10401-DPB10101 DPA10401-DPB10201 DPA10401-DPB10202 DPA10401-DPB10402 DPA10401-DPB10501 DPA10401-DPB110501 DPA10401-DPB14901
KEPPCLWSGFELLPDKWTVQ

SEQ ID NO: 7188 - protein, 20 aa, synthetic construct
  source 1..20: note = Seed: KEPPFLWMGYELHPDKWTVQ; note = HLAs: DRB1_0101 DRB1_1001 DPA10103-DPB10101 DPA10103-DPB10201 DPA10103-DPB10202 DPA10103-DPB10401 DPA10103-DPB10402 DPA10103-DPB10501 DPA10103-DPB110501 DPA10103-DPB112601 DPA10103-DPB11501 DPA10103-DPB11601 DPA10103-DPB11801 DPA10103-DPB11901 DPA10103-DPB12301 DPA10103-DPB13101 DPA10103-DPB13401 DPA10103-DPB13901 DPA10103-DPB14001 DPA10103-DPB14101 DPA10103-DPB14801 DPA10103-DPB14901 DPA10103-DPB15001 DPA10103-DPB15101 DPA10103-DPB15501 DPA10103-DPB15901 DPA10103-DPB18001 DPA10104-DPB10101 DPA10104-DPB11501 DPA10105-DPB10101 DPA10105-DPB10401 DPA10105-DPB11801 DPA10105-DPB15001 DPA10106-DPB10101 DPA10201-DPB10101 DPA10201-DPB10201 DPA10201-DPB10202 DPA10201-DPB10401 DPA10201-DPB10501 DPA10201-DPB110601 DPA10201-DPB11501 DPA10201-DPB11601 DPA10201-DPB11901 DPA10201-DPB13401 DPA10201-DPB15501 DPA10202-DPB10101 DPA10202-DPB10201 DPA10202-DPB10202 DPA10202-DPB10401 DPA10202-DPB10501 DPA10202-DPB110601 DPA10202-DPB11101 DPA10202-DPB11301 DPA10202-DPB11801 DPA10202-DPB11901; note = HLAs: DPA10202-DPB13101 DPA10202-DPB13801 DPA10202-DPB15501 DPA10202-DPB16501 DPA10301-DPB10101 DPA10301-DPB10201 DPA10301-DPB10202 DPA10301-DPB10401 DPA10301-DPB10402 DPA10301-DPB110501 DPA10301-DPB110601 DPA10301-DPB11101 DPA10301-DPB11301 DPA10301-DPB11801 DPA10301-DPB12301 DPA10301-DPB13901 DPA10301-DPB14001 DPA10301-DPB14901 DPA10301-DPB15501 DPA10301-DPB16501 DPA10301-DPB17501 DPA10301-DPB18001 DPA10401-DPB10101 DPA10401-DPB10201 DPA10401-DPB10202 DPA10401-DPB10402 DPA10401-DPB10501 DPA10401-DPB110501 DPA10401-DPB14901
KEPPFLWIGMELVPDKWTVQ

SEQ ID NO: 7189 - protein, 14 aa, synthetic construct
  source 1..14: note = Seed: PPFLWMGYELHPDK; note = HLAs: DRB1_1001 DPA10103-DPB10101 DPA10103-DPB10201 DPA10103-DPB10202 DPA10103-DPB10401 DPA10103-DPB112601 DPA10103-DPB11501 DPA10103-DPB11601 DPA10103-DPB11901 DPA10103-DPB12301 DPA10103-DPB13101 DPA10103-DPB13401 DPA10103-DPB13901 DPA10103-DPB14001 DPA10103-DPB14101 DPA10103-DPB14801 DPA10103-DPB15001 DPA10103-DPB15901 DPA10104-DPB10101 DPA10104-DPB11501 DPA10105-DPB10101 DPA10105-DPB10401 DPA10105-DPB15001 DPA10106-DPB10101 DPA10201-DPB10101 DPA10201-DPB110601 DPA10201-DPB11501 DPA10201-DPB11601 DPA10201-DPB11901 DPA10202-DPB10101 DPA10202-DPB10201 DPA10202-DPB10202 DPA10202-DPB10401 DPA10202-DPB110601 DPA10202-DPB11901 DPA10202-DPB13101 DPA10202-DPB16501 DPA10301-DPB10101 DPA10301-DPB10201 DPA10301-DPB10202 DPA10301-DPB10401 DPA10301-DPB10402 DPA10301-DPB110501 DPA10301-DPB110601 DPA10301-DPB11801 DPA10301-DPB12301 DPA10301-DPB13901 DPA10301-DPB14001 DPA10301-DPB14901 DPA10301-DPB15501 DPA10301-DPB16501 DPA10301-DPB17501 DPA10301-DPB18001 DPA10401-DPB10101 DPA10401-DPB10201; note = HLAs: DPA10401-DPB10202 DPA10401-DPB10402 DPA10401-DPB10501 DPA10401-DPB110501 DPA10401-DPB14901
PPYLWFGYELIPDK

SEQ ID NO: 7190 - protein, 20 aa, synthetic construct
  source 1..20: note = Seed: KEPPFLWMGYELHPDKWTVQ; note = HLAs: DRB1_1001 DPA10103-DPB10101 DPA10103-DPB10201 DPA10103-DPB10202 DPA10103-DPB10401 DPA10103-DPB10402 DPA10103-DPB10501 DPA10103-DPB110501 DPA10103-DPB112601 DPA10103-DPB11501 DPA10103-DPB11601 DPA10103-DPB11801 DPA10103-DPB11901 DPA10103-DPB12301 DPA10103-DPB13101 DPA10103-DPB13401 DPA10103-DPB13901 DPA10103-DPB14001 DPA10103-DPB14101 DPA10103-DPB14801 DPA10103-DPB14901 DPA10103-DPB15001 DPA10103-DPB15101 DPA10103-DPB15501 DPA10103-DPB15901 DPA10103-DPB18001 DPA10104-DPB10101 DPA10104-DPB11501 DPA10105-DPB10101 DPA10105-DPB10401 DPA10105-DPB11801 DPA10105-DPB15001 DPA10106-DPB10101 DPA10201-DPB10101 DPA10201-DPB10201 DPA10201-DPB10202 DPA10201-DPB10401 DPA10201-DPB10501 DPA10201-DPB110601 DPA10201-DPB11501 DPA10201-DPB11601 DPA10201-DPB11901 DPA10201-DPB13401 DPA10201-DPB15501 DPA10202-DPB10101 DPA10202-DPB10201 DPA10202-DPB10202 DPA10202-DPB10401 DPA10202-DPB10501 DPA10202-DPB110601 DPA10202-DPB11101 DPA10202-DPB11301 DPA10202-DPB11801 DPA10202-DPB11901 DPA10202-DPB13101; note = HLAs: DPA10202-DPB13801 DPA10202-DPB15501 DPA10202-DPB16501 DPA10301-DPB10101 DPA10301-DPB10201 DPA10301-DPB10202 DPA10301-DPB10401 DPA10301-DPB10402 DPA10301-DPB110501 DPA10301-DPB110601 DPA10301-DPB11101 DPA10301-DPB11301 DPA10301-DPB11801 DPA10301-DPB12301 DPA10301-DPB13901 DPA10301-DPB14001 DPA10301-DPB14901 DPA10301-DPB15501 DPA10301-DPB16501 DPA10301-DPB17501 DPA10301-DPB18001 DPA10401-DPB10101 DPA10401-DPB10201 DPA10401-DPB10202 DPA10401-DPB10402 DPA10401-DPB10501 DPA10401-DPB110501 DPA10401-DPB14901
KEPPFLWSGWELNPDKWTVQ

SEQ ID NO: 7191 - protein, 20 aa, synthetic construct
  source 1..20: note = Seed: KEPPFLWMGYELHPDKWTVQ; note = HLAs: DPA10103-DPB10101 DPA10103-DPB10201 DPA10103-DPB10202 DPA10103-DPB10401 DPA10103-DPB10402 DPA10103-DPB10501 DPA10103-DPB110501 DPA10103-DPB112601 DPA10103-DPB11501 DPA10103-DPB11601 DPA10103-DPB11801 DPA10103-DPB11901 DPA10103-DPB12301 DPA10103-DPB13101 DPA10103-DPB13401 DPA10103-DPB13901 DPA10103-DPB14001 DPA10103-DPB14101 DPA10103-DPB14801 DPA10103-DPB14901 DPA10103-DPB15001 DPA10103-DPB15101 DPA10103-DPB15501 DPA10103-DPB15901 DPA10103-DPB18001 DPA10104-DPB10101 DPA10104-DPB11501 DPA10105-DPB10101 DPA10105-DPB10401 DPA10105-DPB11801 DPA10105-DPB15001 DPA10106-DPB10101 DPA10201-DPB10101 DPA10201-DPB10201 DPA10201-DPB10202 DPA10201-DPB10401 DPA10201-DPB10501 DPA10201-DPB110601 DPA10201-DPB11501 DPA10201-DPB11601 DPA10201-DPB11901 DPA10201-DPB13401 DPA10201-DPB15501 DPA10202-DPB10101 DPA10202-DPB10201 DPA10202-DPB10202 DPA10202-DPB10401 DPA10202-DPB10501 DPA10202-DPB110601 DPA10202-DPB11101 DPA10202-DPB11301 DPA10202-DPB11801 DPA10202-DPB11901 DPA10202-DPB13101 DPA10202-DPB13801; note = HLAs: DPA10202-DPB15501 DPA10202-DPB16501 DPA10301-DPB10101 DPA10301-DPB10201 DPA10301-DPB10202 DPA10301-DPB10401 DPA10301-DPB10402 DPA10301-DPB110501 DPA10301-DPB110601 DPA10301-DPB11101 DPA10301-DPB11301 DPA10301-DPB11801 DPA10301-DPB12301 DPA10301-DPB13901 DPA10301-DPB14001 DPA10301-DPB14901 DPA10301-DPB15501 DPA10301-DPB16501 DPA10301-DPB17501 DPA10301-DPB18001 DPA10401-DPB10101 DPA10401-DPB10201 DPA10401-DPB10202 DPA10401-DPB10402 DPA10401-DPB10501 DPA10401-DPB110501 DPA10401-DPB14901
KEPPLLWAGFELEPDKWTVQ

SEQ ID NO: 7192 - protein, 20 aa, synthetic construct
  source 1..20: note = Seed: KEPPFLWMGYELHPDKWTVQ; note = HLAs: DPA10103-DPB10101 DPA10103-DPB10201 DPA10103-DPB10202 DPA10103-DPB10401 DPA10103-DPB10402 DPA10103-DPB10501 DPA10103-DPB110501 DPA10103-DPB112601 DPA10103-DPB11501 DPA10103-DPB11601 DPA10103-DPB11801 DPA10103-DPB11901 DPA10103-DPB12301 DPA10103-DPB13101 DPA10103-DPB13401 DPA10103-DPB13901 DPA10103-DPB14001 DPA10103-DPB14101 DPA10103-DPB14801 DPA10103-DPB14901 DPA10103-DPB15001 DPA10103-DPB15101 DPA10103-DPB15501 DPA10103-DPB15901 DPA10103-DPB18001 DPA10104-DPB10101 DPA10104-DPB11501 DPA10105-DPB10101 DPA10105-DPB10401 DPA10105-DPB11801 DPA10105-DPB15001 DPA10106-DPB10101 DPA10201-DPB10101 DPA10201-DPB10201 DPA10201-DPB10202 DPA10201-DPB10401 DPA10201-DPB10501 DPA10201-DPB110601 DPA10201-DPB11501 DPA10201-DPB11601 DPA10201-DPB11901 DPA10201-DPB13401 DPA10201-DPB15501 DPA10202-DPB10101 DPA10202-DPB10201 DPA10202-DPB10202 DPA10202-DPB10401 DPA10202-DPB10501 DPA10202-DPB110601 DPA10202-DPB11101 DPA10202-DPB11301 DPA10202-DPB11801 DPA10202-DPB11901 DPA10202-DPB13101 DPA10202-DPB13801; note = HLAs: DPA10202-DPB15501 DPA10202-DPB16501 DPA10301-DPB10101 DPA10301-DPB10201 DPA10301-DPB10202 DPA10301-DPB10401 DPA10301-DPB10402 DPA10301-DPB110501 DPA10301-DPB110601 DPA10301-DPB11101 DPA10301-DPB11301 DPA10301-DPB11801 DPA10301-DPB12301 DPA10301-DPB13901 DPA10301-DPB14001 DPA10301-DPB14901 DPA10301-DPB15501 DPA10301-DPB16501 DPA10301-DPB17501 DPA10301-DPB18001 DPA10401-DPB10101 DPA10401-DPB10201 DPA10401-DPB10202 DPA10401-DPB10402 DPA10401-DPB10501 DPA10401-DPB110501 DPA10401-DPB14901
KEPPLLWVGFELFPDKWTVQ

SEQ ID NO: 7193 - protein, 14 aa, synthetic construct
  source 1..14: note = Seed: PPFLWMGYELHPDK; note = HLAs: DRB1_1001 DPA10103-DPB10101 DPA10103-DPB10201 DPA10103-DPB10202 DPA10103-DPB10401 DPA10103-DPB112601 DPA10103-DPB11501 DPA10103-DPB11601 DPA10103-DPB11901 DPA10103-DPB12301 DPA10103-DPB13101 DPA10103-DPB13401 DPA10103-DPB13901 DPA10103-DPB14001 DPA10103-DPB14101 DPA10103-DPB14801 DPA10103-DPB15001 DPA10103-DPB15901 DPA10104-DPB10101 DPA10104-DPB11501 DPA10105-DPB10101 DPA10105-DPB10401 DPA10105-DPB15001 DPA10106-DPB10101 DPA10201-DPB10101 DPA10201-DPB110601 DPA10201-DPB11501 DPA10201-DPB11601 DPA10201-DPB11901 DPA10202-DPB10101 DPA10202-DPB10201 DPA10202-DPB10202 DPA10202-DPB10401 DPA10202-DPB110601 DPA10202-DPB11901 DPA10202-DPB13101 DPA10202-DPB16501 DPA10301-DPB10101 DPA10301-DPB10201 DPA10301-DPB10202 DPA10301-DPB10401 DPA10301-DPB10402 DPA10301-DPB110501 DPA10301-DPB110601 DPA10301-DPB11801 DPA10301-DPB12301 DPA10301-DPB13901 DPA10301-DPB14001 DPA10301-DPB14901 DPA10301-DPB15501 DPA10301-DPB16501 DPA10301-DPB17501 DPA10301-DPB18001 DPA10401-DPB10101 DPA10401-DPB10201; note = HLAs: DPA10401-DPB10202 DPA10401-DPB10402 DPA10401-DPB10501 DPA10401-DPB110501 DPA10401-DPB14901
PPFLWIGWELTPDK

SEQ ID NO: 7194 - protein, 14 aa, synthetic construct
  source 1..14: note = Seed: PPFLWMGYELHPDK; note = HLAs: DRB1_1001 DPA10103-DPB10201 DPA10103-DPB10202 DPA10103-DPB11501 DPA10103-DPB11601 DPA10103-DPB11901 DPA10103-DPB13401 DPA10103-DPB14001 DPA10103-DPB14101 DPA10103-DPB14801 DPA10104-DPB11501 DPA10201-DPB110601 DPA10201-DPB11501 DPA10201-DPB11601 DPA10201-DPB11901 DPA10202-DPB10101 DPA10202-DPB10201 DPA10202-DPB10202 DPA10202-DPB10401 DPA10202-DPB110601 DPA10202-DPB11901 DPA10202-DPB13101 DPA10202-DPB16501 DPA10301-DPB10201 DPA10301-DPB10202 DPA10301-DPB10401 DPA10301-DPB10402 DPA10301-DPB110501 DPA10301-DPB110601 DPA10301-DPB11801 DPA10301-DPB12301 DPA10301-DPB13901 DPA10301-DPB14001 DPA10301-DPB14901 DPA10301-DPB15501 DPA10301-DPB18001 DPA10401-DPB10201 DPA10401-DPB10202
PPFLWWGAELLPDK

SEQ ID NO: 7195 - protein, 20 aa, synthetic construct
  source 1..20: note = Seed: KEPPFLWMGYELHPDKWTVQ; note = HLAs: DRB1_0101 DPA10103-DPB10101 DPA10103-DPB10201 DPA10103-DPB10202 DPA10103-DPB10401 DPA10103-DPB10402 DPA10103-DPB10501 DPA10103-DPB110501 DPA10103-DPB112601 DPA10103-DPB11501 DPA10103-DPB11601 DPA10103-DPB11801 DPA10103-DPB11901 DPA10103-DPB12301 DPA10103-DPB13101 DPA10103-DPB13401 DPA10103-DPB13901 DPA10103-DPB14001 DPA10103-DPB14101 DPA10103-DPB14801 DPA10103-DPB14901 DPA10103-DPB15001 DPA10103-DPB15101 DPA10103-DPB15501 DPA10103-DPB15901 DPA10103-DPB18001 DPA10104-DPB10101 DPA10104-DPB11501 DPA10105-DPB10101 DPA10105-DPB10401 DPA10105-DPB11801 DPA10105-DPB15001 DPA10106-DPB10101 DPA10201-DPB10101 DPA10201-DPB10201 DPA10201-DPB10202 DPA10201-DPB10401 DPA10201-DPB10501 DPA10201-DPB110601 DPA10201-DPB11501 DPA10201-DPB11601 DPA10201-DPB11901 DPA10201-DPB13401 DPA10201-DPB15501 DPA10202-DPB10101 DPA10202-DPB10201 DPA10202-DPB10202 DPA10202-DPB10401 DPA10202-DPB10501 DPA10202-DPB110601 DPA10202-DPB11101 DPA10202-DPB11801 DPA10202-DPB11901 DPA10202-DPB13101 DPA10202-DPB13801; note = HLAs: DPA10202-DPB15501 DPA10202-DPB16501 DPA10301-DPB10101 DPA10301-DPB10201 DPA10301-DPB10202 DPA10301-DPB10401 DPA10301-DPB10402 DPA10301-DPB110501 DPA10301-DPB110601 DPA10301-DPB11101 DPA10301-DPB11301 DPA10301-DPB11801 DPA10301-DPB12301 DPA10301-DPB13901 DPA10301-DPB14001 DPA10301-DPB14901 DPA10301-DPB15501 DPA10301-DPB16501 DPA10301-DPB17501 DPA10301-DPB18001 DPA10401-DPB10101 DPA10401-DPB10201 DPA10401-DPB10202 DPA10401-DPB10402 DPA10401-DPB10501 DPA10401-DPB110501 DPA10401-DPB14901
KEPPFLWSGIELYPDKWTVQ

SEQ ID NO: 7196 - protein, 20 aa, synthetic construct
  source 1..20: note = Seed: KEPPFLWMGYELHPDKWTVQ; note = HLAs: DPA10103-DPB10101 DPA10103-DPB10201 DPA10103-DPB10202 DPA10103-DPB10401 DPA10103-DPB10402 DPA10103-DPB10501 DPA10103-DPB110501 DPA10103-DPB112601 DPA10103-DPB11501 DPA10103-DPB11601 DPA10103-DPB11801 DPA10103-DPB11901 DPA10103-DPB12301 DPA10103-DPB13101 DPA10103-DPB13401 DPA10103-DPB13901 DPA10103-DPB14001 DPA10103-DPB14101 DPA10103-DPB14801 DPA10103-DPB14901 DPA10103-DPB15001 DPA10103-DPB15101 DPA10103-DPB15501 DPA10103-DPB15901 DPA10103-DPB18001 DPA10104-DPB10101 DPA10104-DPB11501 DPA10105-DPB10101 DPA10105-DPB10401 DPA10105-DPB11801 DPA10105-DPB15001 DPA10106-DPB10101 DPA10201-DPB10101 DPA10201-DPB10201 DPA10201-DPB10202 DPA10201-DPB10401 DPA10201-DPB10501 DPA10201-DPB110601 DPA10201-DPB11501 DPA10201-DPB11601 DPA10201-DPB11901 DPA10201-DPB13401 DPA10201-DPB15501 DPA10202-DPB10101 DPA10202-DPB10201 DPA10202-DPB10202 DPA10202-DPB10401 DPA10202-DPB10501 DPA10202-DPB110601 DPA10202-DPB11101 DPA10202-DPB11301 DPA10202-DPB11801 DPA10202-DPB11901 DPA10202-DPB13101 DPA10202-DPB13801; note = HLAs: DPA10202-DPB15501 DPA10202-DPB16501 DPA10301-DPB10101 DPA10301-DPB10201 DPA10301-DPB10202 DPA10301-DPB10401 DPA10301-DPB10402 DPA10301-DPB110501 DPA10301-DPB110601 DPA10301-DPB11101 DPA10301-DPB11301 DPA10301-DPB11801 DPA10301-DPB12301 DPA10301-DPB13901 DPA10301-DPB14001 DPA10301-DPB14901 DPA10301-DPB15501 DPA10301-DPB16501 DPA10301-DPB17501 DPA10301-DPB18001 DPA10401-DPB10101 DPA10401-DPB10201 DPA10401-DPB10202 DPA10401-DPB10402 DPA10401-DPB10501 DPA10401-DPB110501 DPA10401-DPB14901
KEPPLLWIGFELEPDKWTVQ

SEQ ID NO: 7197 - protein, 14 aa, synthetic construct
  source 1..14: note = Seed: PPFLWMGYELHPDK; note = HLAs: DPA10103-DPB10101 DPA10103-DPB10201 DPA10103-DPB10202 DPA10103-DPB10401 DPA10103-DPB112601 DPA10103-DPB11501 DPA10103-DPB11601 DPA10103-DPB11901 DPA10103-DPB12301 DPA10103-DPB13101 DPA10103-DPB13401 DPA10103-DPB13901 DPA10103-DPB14001 DPA10103-DPB14101 DPA10103-DPB14801 DPA10103-DPB15001 DPA10103-DPB15901 DPA10104-DPB10101 DPA10104-DPB11501 DPA10105-DPB10101 DPA10105-DPB10401 DPA10105-DPB15001 DPA10106-DPB10101 DPA10201-DPB10101 DPA10201-DPB110601 DPA10201-DPB11501 DPA10201-DPB11601 DPA10201-DPB11901 DPA10202-DPB10101 DPA10202-DPB10201 DPA10202-DPB10202 DPA10202-DPB10401 DPA10202-DPB110601 DPA10202-DPB11901 DPA10202-DPB13101 DPA10202-DPB16501 DPA10301-DPB10101 DPA10301-DPB10201 DPA10301-DPB10202 DPA10301-DPB10401 DPA10301-DPB10402 DPA10301-DPB110501 DPA10301-DPB110601 DPA10301-DPB11801 DPA10301-DPB12301 DPA10301-DPB13901 DPA10301-DPB14001 DPA10301-DPB14901 DPA10301-DPB15501 DPA10301-DPB16501 DPA10301-DPB17501 DPA10301-DPB18001 DPA10401-DPB10101 DPA10401-DPB10201; note = HLAs: DPA10401-DPB10202 DPA10401-DPB10402 DPA10401-DPB10501 DPA10401-DPB110501 DPA10401-DPB14901
PPFLWWGFELTPDK

SEQ ID NO: 7198 - protein, 20 aa, synthetic construct
  source 1..20: note = Seed: KEPPFLWMGYELHPDKWTVQ; note = HLAs: DPA10103-DPB10101 DPA10103-DPB10201 DPA10103-DPB10202 DPA10103-DPB10401 DPA10103-DPB10402 DPA10103-DPB10501 DPA10103-DPB110501 DPA10103-DPB112601 DPA10103-DPB11501 DPA10103-DPB11601 DPA10103-DPB11801 DPA10103-DPB11901 DPA10103-DPB12301 DPA10103-DPB13101 DPA10103-DPB13401 DPA10103-DPB13901 DPA10103-DPB14001 DPA10103-DPB14101 DPA10103-DPB14801 DPA10103-DPB14901 DPA10103-DPB15001 DPA10103-DPB15101 DPA10103-DPB15501 DPA10103-DPB15901 DPA10103-DPB18001 DPA10104-DPB10101 DPA10104-DPB11501 DPA10105-DPB10101 DPA10105-DPB10401 DPA10105-DPB11801 DPA10105-DPB15001 DPA10106-DPB10101 DPA10201-DPB10101 DPA10201-DPB10201 DPA10201-DPB10202 DPA10201-DPB10401 DPA10201-DPB10501 DPA10201-DPB110601 DPA10201-DPB11501 DPA10201-DPB11601 DPA10201-DPB11901 DPA10201-DPB13401 DPA10201-DPB15501 DPA10202-DPB10101 DPA10202-DPB10201 DPA10202-DPB10202 DPA10202-DPB10401 DPA10202-DPB10501 DPA10202-DPB110601 DPA10202-DPB11101 DPA10202-DPB11301 DPA10202-DPB11801 DPA10202-DPB11901 DPA10202-DPB13101 DPA10202-DPB13801; note = HLAs: DPA10202-DPB15501 DPA10202-DPB16501 DPA10301-DPB10101 DPA10301-DPB10201 DPA10301-DPB10202 DPA10301-DPB10401 DPA10301-DPB10402 DPA10301-DPB110501 DPA10301-DPB110601 DPA10301-DPB11101 DPA10301-DPB11301 DPA10301-DPB11801 DPA10301-DPB12301 DPA10301-DPB13901 DPA10301-DPB14001 DPA10301-DPB14901 DPA10301-DPB15501 DPA10301-DPB16501 DPA10301-DPB17501 DPA10301-DPB18001 DPA10401-DPB10101 DPA10401-DPB10201 DPA10401-DPB10202 DPA10401-DPB10402 DPA10401-DPB10501 DPA10401-DPB110501 DPA10401-DPB14901
KEPPILWVGFELYPDKWTVQ

SEQ ID NO: 7199 - protein, 14 aa, synthetic construct
  source 1..14: note = Seed: PPFLWMGYELHPDK; note = HLAs: DPA10103-DPB10101 DPA10103-DPB10201 DPA10103-DPB10202 DPA10103-DPB10401 DPA10103-DPB112601 DPA10103-DPB11501 DPA10103-DPB11601 DPA10103-DPB11901 DPA10103-DPB12301 DPA10103-DPB13101 DPA10103-DPB13401 DPA10103-DPB13901 DPA10103-DPB14001 DPA10103-DPB14101 DPA10103-DPB14801 DPA10103-DPB15001 DPA10103-DPB15901 DPA10104-DPB10101 DPA10104-DPB11501 DPA10105-DPB10101 DPA10105-DPB10401 DPA10105-DPB15001 DPA10106-DPB10101 DPA10201-DPB10101 DPA10201-DPB110601 DPA10201-DPB11501 DPA10201-DPB11601 DPA10201-DPB11901 DPA10202-DPB10101 DPA10202-DPB10201 DPA10202-DPB10202 DPA10202-DPB10401 DPA10202-DPB110601 DPA10202-DPB11901 DPA10202-DPB13101 DPA10202-DPB16501 DPA10301-DPB10101 DPA10301-DPB10201 DPA10301-DPB10202 DPA10301-DPB10401 DPA10301-DPB10402 DPA10301-DPB110501 DPA10301-DPB110601 DPA10301-DPB11801 DPA10301-DPB12301 DPA10301-DPB13901 DPA10301-DPB14001 DPA10301-DPB14901 DPA10301-DPB15501 DPA10301-DPB16501 DPA10301-DPB17501 DPA10301-DPB18001 DPA10401-DPB10101 DPA10401-DPB10201; note = HLAs: DPA10401-DPB10202 DPA10401-DPB10402 DPA10401-DPB10501 DPA10401-DPB110501 DPA10401-DPB14901
PPWLWWGFELVPDK

SEQ ID NO: 7200 - protein, 20 aa, synthetic construct
  source 1..20: note = Seed: KEPPFLWMGYELHPDKWTVQ; note = HLAs: DPA10103-DPB10101 DPA10103-DPB10201 DPA10103-DPB10202 DPA10103-DPB10401 DPA10103-DPB10402 DPA10103-DPB10501 DPA10103-DPB110501 DPA10103-DPB112601 DPA10103-DPB11501 DPA10103-DPB11601 DPA10103-DPB11801 DPA10103-DPB11901 DPA10103-DPB12301 DPA10103-DPB13101 DPA10103-DPB13401 DPA10103-DPB13901 DPA10103-DPB14001 DPA10103-DPB14101 DPA10103-DPB14801 DPA10103-DPB14901 DPA10103-DPB15001 DPA10103-DPB15101 DPA10103-DPB15501 DPA10103-DPB15901 DPA10103-DPB18001 DPA10104-DPB10101 DPA10104-DPB11501 DPA10105-DPB10101 DPA10105-DPB10401 DPA10105-DPB11801 DPA10105-DPB15001 DPA10106-DPB10101 DPA10201-DPB10101 DPA10201-DPB10201 DPA10201-DPB10202 DPA10201-DPB10401 DPA10201-DPB10501 DPA10201-DPB110601 DPA10201-DPB11501 DPA10201-DPB11601 DPA10201-DPB11901 DPA10201-DPB13401 DPA10201-DPB15501 DPA10202-DPB10101 DPA10202-DPB10201 DPA10202-DPB10202 DPA10202-DPB10401 DPA10202-DPB10501 DPA10202-DPB110601 DPA10202-DPB11101 DPA10202-DPB11301 DPA10202-DPB11801 DPA10202-DPB11901 DPA10202-DPB13101 DPA10202-DPB13801; note = HLAs: DPA10202-DPB15501 DPA10202-DPB16501 DPA10301-DPB10101 DPA10301-DPB10201 DPA10301-DPB10202 DPA10301-DPB10401 DPA10301-DPB10402 DPA10301-DPB110501 DPA10301-DPB110601 DPA10301-DPB11101 DPA10301-DPB11301 DPA10301-DPB11801 DPA10301-DPB12301 DPA10301-DPB13901 DPA10301-DPB14001 DPA10301-DPB14901 DPA10301-DPB15501 DPA10301-DPB16501 DPA10301-DPB17501 DPA10301-DPB18001 DPA10401-DPB10101 DPA10401-DPB10201 DPA10401-DPB10202 DPA10401-DPB10402 DPA10401-DPB10501 DPA10401-DPB110501 DPA10401-DPB14901
KEPPLLWTGYELFPDKWTVQ

SEQ ID NO: 7201 - protein, 20 aa, synthetic construct
  source 1..20: note = Seed: KEPPFLWMGYELHPDKWTVQ; note = HLAs: DRB1_0101 DRB1_0405 DRB1_1001 DPA10103-DPB10201 DPA10103-DPB10202 DPA10103-DPB10401 DPA10103-DPB10402 DPA10103-DPB10501 DPA10103-DPB110501 DPA10103-DPB112601 DPA10103-DPB11501 DPA10103-DPB11601 DPA10103-DPB11801 DPA10103-DPB11901 DPA10103-DPB12301 DPA10103-DPB13401 DPA10103-DPB13901 DPA10103-DPB14001 DPA10103-DPB14101 DPA10103-DPB14801 DPA10103-DPB14901 DPA10103-DPB15001 DPA10103-DPB15101 DPA10103-DPB15901 DPA10103-DPB18001 DPA10104-DPB11501 DPA10105-DPB10401 DPA10105-DPB11801 DPA10105-DPB15001 DPA10106-DPB10101 DPA10201-DPB10101 DPA10201-DPB10201 DPA10201-DPB10202 DPA10201-DPB10401 DPA10201-DPB10501 DPA10201-DPB110601 DPA10201-DPB11501 DPA10201-DPB11601 DPA10201-DPB11901 DPA10201-DPB13401 DPA10201-DPB15501 DPA10202-DPB10101 DPA10202-DPB10201 DPA10202-DPB10202 DPA10202-DPB10401 DPA10202-DPB10501 DPA10202-DPB110601 DPA10202-DPB11101 DPA10202-DPB11301 DPA10202-DPB11801 DPA10202-DPB11901 DPA10202-DPB13101 DPA10202-DPB13801 DPA10202-DPB15501 DPA10202-DPB16501 DPA10301-DPB10101; note = HLAs: DPA10301-DPB10201 DPA10301-DPB10202 DPA10301-DPB10401 DPA10301-DPB10402 DPA10301-DPB110501 DPA10301-DPB110601 DPA10301-DPB11801 DPA10301-DPB12301 DPA10301-DPB13901 DPA10301-DPB14001 DPA10301-DPB14901 DPA10301-DPB15501 DPA10301-DPB16501 DPA10301-DPB17501 DPA10301-DPB18001 DPA10401-DPB10101 DPA10401-DPB10201 DPA10401-DPB10202 DPA10401-DPB10402 DPA10401-DPB10501 DPA10401-DPB110501 DPA10401-DPB14901
KEPPFLWQGVELLPDKWTVQ

SEQ ID NO: 7202 - protein, 20 aa, synthetic construct
  source 1..20: note = Seed: KEPPFLWMGYELHPDKWTVQ; note = HLAs: DPA10103-DPB10101 DPA10103-DPB10201 DPA10103-DPB10202 DPA10103-DPB10401 DPA10103-DPB10402 DPA10103-DPB10501 DPA10103-DPB110501 DPA10103-DPB112601 DPA10103-DPB11501 DPA10103-DPB11601 DPA10103-DPB11801 DPA10103-DPB11901 DPA10103-DPB12301 DPA10103-DPB13101 DPA10103-DPB13401 DPA10103-DPB13901 DPA10103-DPB14001 DPA10103-DPB14101 DPA10103-DPB14801 DPA10103-DPB14901 DPA10103-DPB15001 DPA10103-DPB15101 DPA10103-DPB15501 DPA10103-DPB15901 DPA10103-DPB18001 DPA10104-DPB10101 DPA10104-DPB11501 DPA10105-DPB10101 DPA10105-DPB10401 DPA10105-DPB11801 DPA10105-DPB15001 DPA10106-DPB10101 DPA10201-DPB10101 DPA10201-DPB10201 DPA10201-DPB10202 DPA10201-DPB10401 DPA10201-DPB10501 DPA10201-DPB110601 DPA10201-DPB11501 DPA10201-DPB11601 DPA10201-DPB11901 DPA10201-DPB13401 DPA10201-DPB15501 DPA10202-DPB10101 DPA10202-DPB10201 DPA10202-DPB10202 DPA10202-DPB10401 DPA10202-DPB10501 DPA10202-DPB110601 DPA10202-DPB11101 DPA10202-DPB11301 DPA10202-DPB11801 DPA10202-DPB11901 DPA10202-DPB13101 DPA10202-DPB13801; note = HLAs: DPA10202-DPB15501 DPA10202-DPB16501 DPA10301-DPB10101 DPA10301-DPB10201 DPA10301-DPB10202 DPA10301-DPB10401 DPA10301-DPB10402 DPA10301-DPB110501 DPA10301-DPB110601 DPA10301-DPB11101 DPA10301-DPB11301 DPA10301-DPB11801 DPA10301-DPB12301 DPA10301-DPB13901 DPA10301-DPB14001 DPA10301-DPB14901 DPA10301-DPB15501 DPA10301-DPB16501 DPA10301-DPB17501 DPA10301-DPB18001 DPA10401-DPB10101 DPA10401-DPB10201 DPA10401-DPB10202 DPA10401-DPB10402 DPA10401-DPB10501 DPA10401-DPB110501 DPA10401-DPB14901
KEPPLLWSGLELLPDKWTVQ

SEQ ID NO: 7203 - protein, 14 aa, synthetic construct
  source 1..14: note = Seed: PPFLWMGYELHPDK; note = HLAs: DPA10103-DPB10101 DPA10103-DPB10201 DPA10103-DPB10202 DPA10103-DPB10401 DPA10103-DPB112601 DPA10103-DPB11501 DPA10103-DPB11601 DPA10103-DPB11901 DPA10103-DPB12301 DPA10103-DPB13101 DPA10103-DPB13401 DPA10103-DPB13901 DPA10103-DPB14001 DPA10103-DPB14101 DPA10103-DPB14801 DPA10103-DPB15001 DPA10103-DPB15901 DPA10104-DPB10101 DPA10104-DPB11501 DPA10105-DPB10101 DPA10105-DPB10401 DPA10105-DPB15001 DPA10106-DPB10101 DPA10201-DPB10101 DPA10201-DPB110601 DPA10201-DPB11501 DPA10201-DPB11601 DPA10201-DPB11901 DPA10202-DPB10101 DPA10202-DPB10201 DPA10202-DPB10202 DPA10202-DPB10401 DPA10202-DPB110601 DPA10202-DPB11901 DPA10202-DPB13101 DPA10202-DPB16501 DPA10301-DPB10101 DPA10301-DPB10201 DPA10301-DPB10202 DPA10301-DPB10401 DPA10301-DPB10402 DPA10301-DPB110501 DPA10301-DPB110601 DPA10301-DPB11801 DPA10301-DPB12301 DPA10301-DPB13901 DPA10301-DPB14001 DPA10301-DPB14901 DPA10301-DPB15501 DPA10301-DPB16501 DPA10301-DPB17501 DPA10301-DPB18001 DPA10401-DPB10101 DPA10401-DPB10201; note = HLAs: DPA10401-DPB10202 DPA10401-DPB10402 DPA10401-DPB10501 DPA10401-DPB110501 DPA10401-DPB14901
PPFLWNGFELQPDK

SEQ ID NO: 7204 - protein, 20 aa, synthetic construct
  source 1..20: note = Seed: KEPPFLWMGYELHPDKWTVQ; note = HLAs: DPA10103-DPB10101 DPA10103-DPB10201 DPA10103-DPB10202 DPA10103-DPB10401 DPA10103-DPB10402 DPA10103-DPB10501 DPA10103-DPB110501 DPA10103-DPB112601 DPA10103-DPB11501 DPA10103-DPB11601 DPA10103-DPB11801 DPA10103-DPB11901 DPA10103-DPB12301 DPA10103-DPB13101 DPA10103-DPB13401 DPA10103-DPB13901 DPA10103-DPB14001 DPA10103-DPB14101 DPA10103-DPB14801 DPA10103-DPB14901 DPA10103-DPB15001 DPA10103-DPB15101 DPA10103-DPB15501 DPA10103-DPB15901 DPA10103-DPB18001 DPA10104-DPB10101 DPA10104-DPB11501 DPA10105-DPB10101 DPA10105-DPB10401 DPA10105-DPB11801 DPA10105-DPB15001 DPA10106-DPB10101 DPA10201-DPB10101 DPA10201-DPB10201 DPA10201-DPB10202 DPA10201-DPB10401 DPA10201-DPB10501 DPA10201-DPB110601 DPA10201-DPB11501 DPA10201-DPB11601 DPA10201-DPB11901 DPA10201-DPB13401 DPA10201-DPB15501 DPA10202-DPB10101 DPA10202-DPB10201 DPA10202-DPB10202 DPA10202-DPB10401 DPA10202-DPB10501 DPA10202-DPB110601 DPA10202-DPB11101 DPA10202-DPB11301 DPA10202-DPB11801 DPA10202-DPB11901 DPA10202-DPB13101 DPA10202-DPB13801; note = HLAs: DPA10202-DPB15501 DPA10202-DPB16501 DPA10301-DPB10101 DPA10301-DPB10201 DPA10301-DPB10202 DPA10301-DPB10401 DPA10301-DPB10402 DPA10301-DPB110501 DPA10301-DPB110601 DPA10301-DPB11101 DPA10301-DPB11301 DPA10301-DPB11801 DPA10301-DPB12301 DPA10301-DPB13901 DPA10301-DPB14001 DPA10301-DPB14901 DPA10301-DPB15501 DPA10301-DPB16501 DPA10301-DPB17501 DPA10301-DPB18001 DPA10401-DPB10101 DPA10401-DPB10201 DPA10401-DPB10202 DPA10401-DPB10402 DPA10401-DPB10501 DPA10401-DPB110501 DPA10401-DPB14901
KEPPFLWDGYELIPDKWTVQ

SEQ ID NO: 7205 - protein, 20 aa, synthetic construct
  source 1..20: note = Seed: KEPPFLWMGYELHPDKWTVQ; note = HLAs: DPA10103-DPB10101 DPA10103-DPB10201 DPA10103-DPB10202 DPA10103-DPB10401 DPA10103-DPB10402 DPA10103-DPB10501 DPA10103-DPB110501 DPA10103-DPB112601 DPA10103-DPB11501 DPA10103-DPB11601 DPA10103-DPB11801 DPA10103-DPB11901 DPA10103-DPB12301 DPA10103-DPB13101 DPA10103-DPB13401 DPA10103-DPB13901 DPA10103-DPB14001 DPA10103-DPB14101 DPA10103-DPB14801 DPA10103-DPB14901 DPA10103-DPB15001 DPA10103-DPB15101 DPA10103-DPB15501 DPA10103-DPB15901 DPA10103-DPB18001 DPA10104-DPB10101 DPA10104-DPB11501 DPA10105-DPB10101 DPA10105-DPB10401 DPA10105-DPB11801 DPA10105-DPB15001 DPA10106-DPB10101 DPA10201-DPB10101 DPA10201-DPB10201 DPA10201-DPB10202 DPA10201-DPB10401 DPA10201-DPB10501 DPA10201-DPB110601 DPA10201-DPB11501 DPA10201-DPB11601 DPA10201-DPB11901 DPA10201-DPB13401 DPA10201-DPB15501 DPA10202-DPB10101 DPA10202-DPB10201 DPA10202-DPB10202 DPA10202-DPB10401 DPA10202-DPB10501 DPA10202-DPB110601 DPA10202-DPB11301 DPA10202-DPB11801 DPA10202-DPB11901 DPA10202-DPB13101 DPA10202-DPB13801 DPA10202-DPB15501; note = HLAs: DPA10202-DPB16501 DPA10301-DPB10101 DPA10301-DPB10201 DPA10301-DPB10202 DPA10301-DPB10401 DPA10301-DPB10402 DPA10301-DPB110501 DPA10301-DPB110601 DPA10301-DPB11101 DPA10301-DPB11301 DPA10301-DPB11801 DPA10301-DPB12301 DPA10301-DPB13901 DPA10301-DPB14001 DPA10301-DPB14901 DPA10301-DPB15501 DPA10301-DPB16501 DPA10301-DPB17501 DPA10301-DPB18001 DPA10401-DPB10101 DPA10401-DPB10201 DPA10401-DPB10202 DPA10401-DPB10402 DPA10401-DPB10501 DPA10401-DPB110501 DPA10401-DPB14901
KEPPLLWEGYELIPDKWTVQ

SEQ ID NO: 7206 - protein, 20 aa, synthetic construct
  source 1..20: note = Seed: KEPPFLWMGYELHPDKWTVQ; note = HLAs: DPA10103-DPB10101 DPA10103-DPB10201 DPA10103-DPB10202 DPA10103-DPB10401 DPA10103-DPB10402 DPA10103-DPB10501 DPA10103-DPB110501 DPA10103-DPB112601 DPA10103-DPB11501 DPA10103-DPB11601 DPA10103-DPB11801 DPA10103-DPB11901 DPA10103-DPB12301 DPA10103-DPB13401 DPA10103-DPB13901 DPA10103-DPB14001 DPA10103-DPB14101 DPA10103-DPB14801 DPA10103-DPB14901 DPA10103-DPB15101 DPA10103-DPB15501 DPA10103-DPB18001 DPA10104-DPB10101 DPA10104-DPB11501 DPA10105-DPB10101 DPA10105-DPB10401 DPA10105-DPB11801 DPA10106-DPB10101 DPA10201-DPB10101 DPA10201-DPB10201 DPA10201-DPB10202 DPA10201-DPB10401 DPA10201-DPB10501 DPA10201-DPB110601 DPA10201-DPB11501 DPA10201-DPB11601 DPA10201-DPB11901 DPA10201-DPB13401 DPA10201-DPB15501 DPA10202-DPB10201 DPA10202-DPB10202 DPA10202-DPB10401 DPA10202-DPB10501 DPA10202-DPB110601 DPA10202-DPB11301 DPA10202-DPB11801 DPA10202-DPB11901 DPA10202-DPB13101 DPA10202-DPB13801 DPA10301-DPB10101 DPA10301-DPB10201 DPA10301-DPB10202 DPA10301-DPB10401 DPA10301-DPB10402; note = HLAs: DPA10301-DPB110501 DPA10301-DPB110601 DPA10301-DPB11801 DPA10301-DPB12301 DPA10301-DPB13901 DPA10301-DPB14001 DPA10301-DPB14901 DPA10301-DPB16501 DPA10301-DPB17501 DPA10301-DPB18001 DPA10401-DPB10201 DPA10401-DPB10202 DPA10401-DPB10402 DPA10401-DPB10501 DPA10401-DPB110501 DPA10401-DPB14901
KEPPLLWYGFELLPDKWTVQ

SEQ ID NO: 7207 - protein, 20 aa, synthetic construct
  source 1..20: note = Seed: KEPPFLWMGYELHPDKWTVQ; note = HLAs: DRB1_0101 DRB1_0405 DRB1_1001 DPA10103-DPB10101 DPA10103-DPB10201 DPA10103-DPB10202 DPA10103-DPB10401 DPA10103-DPB10402 DPA10103-DPB10501 DPA10103-DPB110501 DPA10103-DPB112601 DPA10103-DPB11501 DPA10103-DPB11601 DPA10103-DPB11801 DPA10103-DPB11901 DPA10103-DPB12301 DPA10103-DPB13101 DPA10103-DPB13401 DPA10103-DPB13901 DPA10103-DPB14001 DPA10103-DPB14101 DPA10103-DPB14801 DPA10103-DPB14901 DPA10103-DPB15001 DPA10103-DPB15101 DPA10103-DPB15501 DPA10103-DPB15901 DPA10103-DPB18001 DPA10104-DPB10101 DPA10104-DPB11501 DPA10105-DPB10101 DPA10105-DPB10401 DPA10105-DPB11801 DPA10105-DPB15001 DPA10106-DPB10101 DPA10201-DPB10101 DPA10201-DPB10201 DPA10201-DPB10202 DPA10201-DPB10401 DPA10201-DPB10501 DPA10201-DPB110601 DPA10201-DPB11501 DPA10201-DPB11601 DPA10201-DPB11901 DPA10201-DPB13401 DPA10201-DPB15501 DPA10202-DPB10101 DPA10202-DPB10201 DPA10202-DPB10202 DPA10202-DPB10401 DPA10202-DPB10501 DPA10202-DPB110601 DPA10202-DPB11101 DPA10202-DPB11301 DPA10202-DPB11801 DPA10202-DPB11901; note = HLAs: DPA10202-DPB13101 DPA10202-DPB13801 DPA10202-DPB15501 DPA10202-DPB16501 DPA10301-DPB10101 DPA10301-DPB10201 DPA10301-DPB10202 DPA10301-DPB10401 DPA10301-DPB10402 DPA10301-DPB110501 DPA10301-DPB110601 DPA10301-DPB11101 DPA10301-DPB11301 DPA10301-DPB11801 DPA10301-DPB12301 DPA10301-DPB13901 DPA10301-DPB14001 DPA10301-DPB14901 DPA10301-DPB15501 DPA10301-DPB16501 DPA10301-DPB17501 DPA10301-DPB18001 DPA10401-DPB10101 DPA10401-DPB10201 DPA10401-DPB10202 DPA10401-DPB10402 DPA10401-DPB10501 DPA10401-DPB110501 DPA10401-DPB14901
KEPPFLWMGLELVPDKWTVQ

SEQ ID NO: 7208 - protein, 20 aa, synthetic construct
  source 1..20: note = Seed: KEPPFLWMGYELHPDKWTVQ; note = HLAs: DRB1_0101 DRB1_1001 DPA10103-DPB10101 DPA10103-DPB10201 DPA10103-DPB10202 DPA10103-DPB10401 DPA10103-DPB10402 DPA10103-DPB10501 DPA10103-DPB110501 DPA10103-DPB112601 DPA10103-DPB11501 DPA10103-DPB11601 DPA10103-DPB11801 DPA10103-DPB11901 DPA10103-DPB12301 DPA10103-DPB13101 DPA10103-DPB13401 DPA10103-DPB13901 DPA10103-DPB14001 DPA10103-DPB14101 DPA10103-DPB14801 DPA10103-DPB14901 DPA10103-DPB15001 DPA10103-DPB15101 DPA10103-DPB15501 DPA10103-DPB15901 DPA10103-DPB18001 DPA10104-DPB10101 DPA10104-DPB11501 DPA10105-DPB10101 DPA10105-DPB10401 DPA10105-DPB11801 DPA10105-DPB15001 DPA10106-DPB10101 DPA10201-DPB10101 DPA10201-DPB10201 DPA10201-DPB10202 DPA10201-DPB10401 DPA10201-DPB10501 DPA10201-DPB110601 DPA10201-DPB11501 DPA10201-DPB11601 DPA10201-DPB11901 DPA10201-DPB13401 DPA10201-DPB15501 DPA10202-DPB10101 DPA10202-DPB10201 DPA10202-DPB10202 DPA10202-DPB10501 DPA10202-DPB110601 DPA10202-DPB11101 DPA10202-DPB11801 DPA10202-DPB11901 DPA10202-DPB13101 DPA10202-DPB13801; note = HLAs: DPA10202-DPB15501 DPA10202-DPB16501 DPA10301-DPB10101 DPA10301-DPB10201 DPA10301-DPB10202 DPA10301-DPB10401 DPA10301-DPB10402 DPA10301-DPB110501 DPA10301-DPB110601 DPA10301-DPB11101 DPA10301-DPB11301 DPA10301-DPB11801 DPA10301-DPB12301 DPA10301-DPB13901 DPA10301-DPB14001 DPA10301-DPB14901 DPA10301-DPB15501 DPA10301-DPB16501 DPA10301-DPB17501 DPA10301-DPB18001 DPA10401-DPB10101 DPA10401-DPB10201 DPA10401-DPB10202 DPA10401-DPB10402 DPA10401-DPB10501 DPA10401-DPB110501 DPA10401-DPB14901
KEPPFLWAGIELFPDKWTVQ

SEQ ID NO: 7209 - protein, 14 aa, synthetic construct
  source 1..14: note = Seed: PPFLWMGYELHPDK; note = HLAs: DPA10103-DPB10101 DPA10103-DPB10201 DPA10103-DPB10202 DPA10103-DPB10401 DPA10103-DPB112601 DPA10103-DPB11501 DPA10103-DPB11601 DPA10103-DPB11901 DPA10103-DPB12301 DPA10103-DPB13101 DPA10103-DPB13401 DPA10103-DPB13901 DPA10103-DPB14001 DPA10103-DPB14101 DPA10103-DPB14801 DPA10103-DPB15001 DPA10103-DPB15901 DPA10104-DPB10101 DPA10104-DPB11501 DPA10105-DPB10101 DPA10105-DPB10401 DPA10105-DPB15001 DPA10106-DPB10101 DPA10201-DPB10101 DPA10201-DPB110601 DPA10201-DPB11501 DPA10201-DPB11601 DPA10201-DPB11901 DPA10202-DPB10101 DPA10202-DPB10201 DPA10202-DPB10202 DPA10202-DPB10401 DPA10202-DPB110601 DPA10202-DPB11901 DPA10202-DPB13101 DPA10202-DPB16501 DPA10301-DPB10101 DPA10301-DPB10201 DPA10301-DPB10202 DPA10301-DPB10401 DPA10301-DPB10402 DPA10301-DPB110501 DPA10301-DPB110601 DPA10301-DPB11801 DPA10301-DPB12301 DPA10301-DPB13901 DPA10301-DPB14001 DPA10301-DPB14901 DPA10301-DPB15501 DPA10301-DPB16501 DPA10301-DPB17501 DPA10301-DPB18001 DPA10401-DPB10101 DPA10401-DPB10201; note = HLAs: DPA10401-DPB10202 DPA10401-DPB10402 DPA10401-DPB10501 DPA10401-DPB110501 DPA10401-DPB14901
PPFLWNGYELFPDK

SEQ ID NO: 7210 - protein, 14 aa, synthetic construct
  source 1..14: note = Seed: PPFLWMGYELHPDK; note = HLAs: DPA10103-DPB10101 DPA10103-DPB10201 DPA10103-DPB10202 DPA10103-DPB10401 DPA10103-DPB112601 DPA10103-DPB11501 DPA10103-DPB11601 DPA10103-DPB11901 DPA10103-DPB12301 DPA10103-DPB13101 DPA10103-DPB13401 DPA10103-DPB13901 DPA10103-DPB14001 DPA10103-DPB14101 DPA10103-DPB14801 DPA10103-DPB15001 DPA10103-DPB15901 DPA10104-DPB10101 DPA10104-DPB11501 DPA10105-DPB10101 DPA10105-DPB10401 DPA10105-DPB15001 DPA10106-DPB10101 DPA10201-DPB10101 DPA10201-DPB110601 DPA10201-DPB11501 DPA10201-DPB11601 DPA10201-DPB11901 DPA10202-DPB10101 DPA10202-DPB10201 DPA10202-DPB10202 DPA10202-DPB10401 DPA10202-DPB110601 DPA10202-DPB11901 DPA10202-DPB13101 DPA10202-DPB16501 DPA10301-DPB10101 DPA10301-DPB10201 DPA10301-DPB10202 DPA10301-DPB10401 DPA10301-DPB10402 DPA10301-DPB110501 DPA10301-DPB110601 DPA10301-DPB11801 DPA10301-DPB12301 DPA10301-DPB13901 DPA10301-DPB14001 DPA10301-DPB14901 DPA10301-DPB15501 DPA10301-DPB16501 DPA10301-DPB17501 DPA10301-DPB18001 DPA10401-DPB10101 DPA10401-DPB10201; note = HLAs: DPA10401-DPB10202 DPA10401-DPB10402 DPA10401-DPB10501 DPA10401-DPB110501 DPA10401-DPB14901
PPFLWDGYELIPDK

SEQ ID NO: 7211 - protein, 14 aa, synthetic construct
  source 1..14: note = Seed: PPFLWMGYELHPDK; note = HLAs: DRB1_1001 DPA10103-DPB10101 DPA10103-DPB10201 DPA10103-DPB10202 DPA10103-DPB10401 DPA10103-DPB112601 DPA10103-DPB11501 DPA10103-DPB11601 DPA10103-DPB11901 DPA10103-DPB12301 DPA10103-DPB13101 DPA10103-DPB13401 DPA10103-DPB13901 DPA10103-DPB14001 DPA10103-DPB14101 DPA10103-DPB14801 DPA10103-DPB15001 DPA10103-DPB15901 DPA10104-DPB10101 DPA10104-DPB11501 DPA10105-DPB10101 DPA10105-DPB10401 DPA10105-DPB15001 DPA10106-DPB10101 DPA10201-DPB10101 DPA10201-DPB110601 DPA10201-DPB11501 DPA10201-DPB11601 DPA10201-DPB11901 DPA10202-DPB10101 DPA10202-DPB10201 DPA10202-DPB10202 DPA10202-DPB10401 DPA10202-DPB110601 DPA10202-DPB11901 DPA10202-DPB13101 DPA10202-DPB16501 DPA10301-DPB10101 DPA10301-DPB10201 DPA10301-DPB10202 DPA10301-DPB10401 DPA10301-DPB10402 DPA10301-DPB110501 DPA10301-DPB110601 DPA10301-DPB11801 DPA10301-DPB12301 DPA10301-DPB13901 DPA10301-DPB14001 DPA10301-DPB14901 DPA10301-DPB15501 DPA10301-DPB16501 DPA10301-DPB17501 DPA10301-DPB18001 DPA10401-DPB10101 DPA10401-DPB10201; note = HLAs: DPA10401-DPB10202 DPA10401-DPB10402 DPA10401-DPB10501 DPA10401-DPB110501 DPA10401-DPB14901
PPFLWIGVELIPDK

SEQ ID NO: 7212 - protein, 20 aa, synthetic construct
  source 1..20: note = Seed: KEPPFLWMGYELHPDKWTVQ; note = HLAs: DRB1_0101 DRB1_0405 DRB1_1001 DPA10103-DPB10201 DPA10103-DPB10202 DPA10103-DPB10401 DPA10103-DPB10402 DPA10103-DPB10501 DPA10103-DPB110501 DPA10103-DPB112601 DPA10103-DPB11501 DPA10103-DPB11601 DPA10103-DPB11801 DPA10103-DPB11901 DPA10103-DPB12301 DPA10103-DPB13101 DPA10103-DPB13401 DPA10103-DPB13901 DPA10103-DPB14001 DPA10103-DPB14101 DPA10103-DPB14801 DPA10103-DPB14901 DPA10103-DPB15001 DPA10103-DPB15101 DPA10103-DPB15501 DPA10103-DPB15901 DPA10103-DPB18001 DPA10104-DPB11501 DPA10105-DPB10401 DPA10105-DPB11801 DPA10105-DPB15001 DPA10106-DPB10101 DPA10201-DPB10101 DPA10201-DPB10201 DPA10201-DPB10202 DPA10201-DPB10401 DPA10201-DPB10501 DPA10201-DPB110601 DPA10201-DPB11501 DPA10201-DPB11601 DPA10201-DPB11901 DPA10201-DPB13401 DPA10201-DPB15501 DPA10202-DPB10101 DPA10202-DPB10201 DPA10202-DPB10202 DPA10202-DPB10401 DPA10202-DPB10501 DPA10202-DPB110601 DPA10202-DPB11101 DPA10202-DPB11301 DPA10202-DPB11801 DPA10202-DPB11901 DPA10202-DPB13101 DPA10202-DPB13801 DPA10202-DPB15501; note = HLAs: DPA10202-DPB16501 DPA10301-DPB10101 DPA10301-DPB10201 DPA10301-DPB10202 DPA10301-DPB10401 DPA10301-DPB10402 DPA10301-DPB110501 DPA10301-DPB110601 DPA10301-DPB11101 DPA10301-DPB11301 DPA10301-DPB11801 DPA10301-DPB12301 DPA10301-DPB13901 DPA10301-DPB14001 DPA10301-DPB14901 DPA10301-DPB15501 DPA10301-DPB16501 DPA10301-DPB17501 DPA10301-DPB18001 DPA10401-DPB10201 DPA10401-DPB10202 DPA10401-DPB10402 DPA10401-DPB10501 DPA10401-DPB110501 DPA10401-DPB14901
KEPPFLWHGAELLPDKWTVQ

SEQ ID NO: 7213 - protein, 20 aa, synthetic construct
  source 1..20: note = Seed: KEPPFLWMGYELHPDKWTVQ; note = HLAs: DRB1_1001 DPA10103-DPB10101 DPA10103-DPB10201 DPA10103-DPB10202 DPA10103-DPB10401 DPA10103-DPB10402 DPA10103-DPB10501 DPA10103-DPB110501 DPA10103-DPB112601 DPA10103-DPB11501 DPA10103-DPB11601 DPA10103-DPB11801 DPA10103-DPB11901 DPA10103-DPB12301 DPA10103-DPB13101 DPA10103-DPB13401 DPA10103-DPB13901 DPA10103-DPB14001 DPA10103-DPB14101 DPA10103-DPB14801 DPA10103-DPB14901 DPA10103-DPB15001 DPA10103-DPB15101 DPA10103-DPB15501 DPA10103-DPB15901 DPA10103-DPB18001 DPA10104-DPB10101 DPA10104-DPB11501 DPA10105-DPB10101 DPA10105-DPB10401 DPA10105-DPB11801 DPA10105-DPB15001 DPA10106-DPB10101 DPA10201-DPB10101 DPA10201-DPB10201 DPA10201-DPB10202 DPA10201-DPB10401 DPA10201-DPB10501 DPA10201-DPB110601 DPA10201-DPB11501 DPA10201-DPB11601 DPA10201-DPB11901 DPA10201-DPB13401 DPA10202-DPB10101 DPA10202-DPB10201 DPA10202-DPB10202 DPA10202-DPB10401 DPA10202-DPB10501 DPA10202-DPB110601 DPA10202-DPB11301 DPA10202-DPB11801 DPA10202-DPB11901 DPA10202-DPB13101 DPA10202-DPB13801 DPA10202-DPB15501; note = HLAs: DPA10202-DPB16501 DPA10301-DPB10101 DPA10301-DPB10201 DPA10301-DPB10202 DPA10301-DPB10401 DPA10301-DPB10402 DPA10301-DPB110501 DPA10301-DPB110601 DPA10301-DPB11101 DPA10301-DPB11801 DPA10301-DPB12301 DPA10301-DPB13901 DPA10301-DPB14001 DPA10301-DPB14901 DPA10301-DPB15501 DPA10301-DPB16501 DPA10301-DPB17501 DPA10301-DPB18001 DPA10401-DPB10101 DPA10401-DPB10201 DPA10401-DPB10202 DPA10401-DPB10402 DPA10401-DPB10501 DPA10401-DPB110501 DPA10401-DPB14901
KEPPFLWEGFELGPDKWTVQ

SEQ ID NO: 7214 - protein, 20 aa, synthetic construct
  source 1..20: note = Seed: KEPPFLWMGYELHPDKWTVQ; note = HLAs: DRB1_0101 DRB1_0405 DRB1_1001 DPA10103-DPB11501 DPA10103-DPB11801 DPA10103-DPB13401 DPA10104-DPB11501 DPA10105-DPB11801 DPA10201-DPB10201 DPA10201-DPB10202 DPA10201-DPB10401 DPA10201-DPB10501 DPA10201-DPB11501 DPA10201-DPB11601 DPA10201-DPB13401 DPA10202-DPB10101 DPA10202-DPB10201 DPA10202-DPB10202 DPA10202-DPB10401 DPA10202-DPB10501 DPA10202-DPB110601 DPA10202-DPB11101 DPA10202-DPB11301 DPA10202-DPB11801 DPA10202-DPB11901 DPA10202-DPB13801 DPA10202-DPB15501 DPA10202-DPB16501 DPA10301-DPB10201 DPA10301-DPB10202 DPA10301-DPB10402 DPA10301-DPB110501 DPA10301-DPB11801 DPA10301-DPB14001 DPA10301-DPB14901 DPA10301-DPB17501 DPA10301-DPB18001
KEPPFLWVGTELLPDKWTVQ

SEQ ID NO: 7215 - protein, 20 aa, synthetic construct
  source 1..20: note = Seed: KEPPFLWMGYELHPDKWTVQ; note = HLAs: DPA10103-DPB10101 DPA10103-DPB10201 DPA10103-DPB10202 DPA10103-DPB10401 DPA10103-DPB10402 DPA10103-DPB10501 DPA10103-DPB110501 DPA10103-DPB112601 DPA10103-DPB11501 DPA10103-DPB11601 DPA10103-DPB11801 DPA10103-DPB11901 DPA10103-DPB12301 DPA10103-DPB13101 DPA10103-DPB13401 DPA10103-DPB13901 DPA10103-DPB14001 DPA10103-DPB14101 DPA10103-DPB14801 DPA10103-DPB14901 DPA10103-DPB15001 DPA10103-DPB15101 DPA10103-DPB15501 DPA10103-DPB15901 DPA10103-DPB18001 DPA10104-DPB10101 DPA10104-DPB11501 DPA10105-DPB10101 DPA10105-DPB10401 DPA10105-DPB11801 DPA10105-DPB15001 DPA10106-DPB10101 DPA10201-DPB10101 DPA10201-DPB10201 DPA10201-DPB10202 DPA10201-DPB10401 DPA10201-DPB10501 DPA10201-DPB110601 DPA10201-DPB11501 DPA10201-DPB11601 DPA10201-DPB11901 DPA10201-DPB13401 DPA10201-DPB15501 DPA10202-DPB10101 DPA10202-DPB10201 DPA10202-DPB10202 DPA10202-DPB10401 DPA10202-DPB10501 DPA10202-DPB110601 DPA10202-DPB11301 DPA10202-DPB11901 DPA10202-DPB13101 DPA10202-DPB13801 DPA10202-DPB15501 DPA10202-DPB16501; note = HLAs: DPA10301-DPB10101 DPA10301-DPB10201 DPA10301-DPB10202 DPA10301-DPB10401 DPA10301-DPB10402 DPA10301-DPB110501 DPA10301-DPB110601 DPA10301-DPB11101 DPA10301-DPB11301 DPA10301-DPB11801 DPA10301-DPB12301 DPA10301-DPB13901 DPA10301-DPB14001 DPA10301-DPB14901 DPA10301-DPB15501 DPA10301-DPB16501 DPA10301-DPB17501 DPA10301-DPB18001 DPA10401-DPB10101 DPA10401-DPB10201 DPA10401-DPB10202 DPA10401-DPB10402 DPA10401-DPB10501 DPA10401-DPB110501 DPA10401-DPB14901
KEPPWLWDGFELLPDKWTVQ

SEQ ID NO: 7216 - protein, 20 aa, synthetic construct
  source 1..20: note = Seed: KEPPFLWMGYELHPDKWTVQ; note = HLAs: DRB1_0101 DPA10103-DPB10101 DPA10103-DPB10201 DPA10103-DPB10202 DPA10103-DPB10401 DPA10103-DPB10402 DPA10103-DPB10501 DPA10103-DPB110501 DPA10103-DPB112601 DPA10103-DPB11501 DPA10103-DPB11601 DPA10103-DPB11801 DPA10103-DPB11901 DPA10103-DPB12301 DPA10103-DPB13101 DPA10103-DPB13401 DPA10103-DPB13901 DPA10103-DPB14001 DPA10103-DPB14101 DPA10103-DPB14801 DPA10103-DPB14901 DPA10103-DPB15001 DPA10103-DPB15101 DPA10103-DPB15501 DPA10103-DPB15901 DPA10103-DPB18001 DPA10104-DPB10101 DPA10104-DPB11501 DPA10105-DPB10101 DPA10105-DPB10401 DPA10105-DPB11801 DPA10105-DPB15001 DPA10106-DPB10101 DPA10201-DPB10101 DPA10201-DPB10201 DPA10201-DPB10202 DPA10201-DPB10401 DPA10201-DPB10501 DPA10201-DPB110601 DPA10201-DPB11501 DPA10201-DPB11601 DPA10201-DPB11901 DPA10201-DPB13401 DPA10201-DPB15501 DPA10202-DPB10101 DPA10202-DPB10201 DPA10202-DPB10202 DPA10202-DPB10401 DPA10202-DPB10501 DPA10202-DPB110601 DPA10202-DPB11101 DPA10202-DPB11301 DPA10202-DPB11801 DPA10202-DPB11901 DPA10202-DPB13101; note = HLAs: DPA10202-DPB13801 DPA10202-DPB15501 DPA10202-DPB16501 DPA10301-DPB10101 DPA10301-DPB10201 DPA10301-DPB10202 DPA10301-DPB10401 DPA10301-DPB10402 DPA10301-DPB110501 DPA10301-DPB110601 DPA10301-DPB11101 DPA10301-DPB11301 DPA10301-DPB11801 DPA10301-DPB12301 DPA10301-DPB13901 DPA10301-DPB14001 DPA10301-DPB14901 DPA10301-DPB16501 DPA10301-DPB17501 DPA10301-DPB18001 DPA10401-DPB10101 DPA10401-DPB10201 DPA10401-DPB10202 DPA10401-DPB10402 DPA10401-DPB10501 DPA10401-DPB110501 DPA10401-DPB14901
KEPPILWLGFELLPDKWTVQ

SEQ ID NO: 7217 - protein, 20 aa, synthetic construct
  source 1..20: note = Seed: KEPPFLWMGYELHPDKWTVQ; note = HLAs: DRB1_1602 DQA10101-DQB10501 DQA10101-DQB10503 DQA10102-DQB10501 DQA10102-DQB10502 DQA10102-DQB10503 DQA10103-DQB10501 DQA10104-DQB10501 DQA10104-DQB10503 DQA10105-DQB10501 DQA10107-DQB10503 DQA10505-DQB10402
KEPPFLIMGWEVHPAKWTVQ

SEQ ID NO: 7218 - protein, 20 aa, synthetic construct
  source 1..20: note = Seed: KEPPFLWMGYELHPDKWTVQ; note = HLAs: DRB1_0101 DRB1_0405 DRB1_1001 DPA10103-DPB10101 DPA10103-DPB10201 DPA10103-DPB10202 DPA10103-DPB10401 DPA10103-DPB10402 DPA10103-DPB10501 DPA10103-DPB110501 DPA10103-DPB112601 DPA10103-DPB11501 DPA10103-DPB11601 DPA10103-DPB11801 DPA10103-DPB11901 DPA10103-DPB12301 DPA10103-DPB13101 DPA10103-DPB13401 DPA10103-DPB13901 DPA10103-DPB14001 DPA10103-DPB14101 DPA10103-DPB14801 DPA10103-DPB14901 DPA10103-DPB15001 DPA10103-DPB15101 DPA10103-DPB15501 DPA10103-DPB15901 DPA10103-DPB18001 DPA10104-DPB10101 DPA10104-DPB11501 DPA10105-DPB10101 DPA10105-DPB10401 DPA10105-DPB11801 DPA10105-DPB15001 DPA10106-DPB10101 DPA10201-DPB10101 DPA10201-DPB10201 DPA10201-DPB10202 DPA10201-DPB10401 DPA10201-DPB10501 DPA10201-DPB110601 DPA10201-DPB11501 DPA10201-DPB11601 DPA10201-DPB11901 DPA10201-DPB13401 DPA10201-DPB15501 DPA10202-DPB10101 DPA10202-DPB10201 DPA10202-DPB10202 DPA10202-DPB10401 DPA10202-DPB10501 DPA10202-DPB110601 DPA10202-DPB11101 DPA10202-DPB11301 DPA10202-DPB11801 DPA10202-DPB11901; note = HLAs: DPA10202-DPB13101 DPA10202-DPB13801 DPA10202-DPB15501 DPA10202-DPB16501 DPA10301-DPB10101 DPA10301-DPB10201 DPA10301-DPB10202 DPA10301-DPB10401 DPA10301-DPB10402 DPA10301-DPB110501 DPA10301-DPB110601 DPA10301-DPB11101 DPA10301-DPB11301 DPA10301-DPB11801 DPA10301-DPB12301 DPA10301-DPB13901 DPA10301-DPB14001 DPA10301-DPB14901 DPA10301-DPB15501 DPA10301-DPB16501 DPA10301-DPB17501 DPA10301-DPB18001 DPA10401-DPB10101 DPA10401-DPB10201 DPA10401-DPB10202 DPA10401-DPB10402 DPA10401-DPB10501 DPA10401-DPB110501 DPA10401-DPB14901
KEPPYLWMGFELAPDKWTVQ

SEQ ID NO: 7219 - protein, 20 aa, synthetic construct
  source 1..20: note = Seed: KEPPFLWMGYELHPDKWTVQ; note = HLAs: DRB1_0101 DRB1_1001 DPA10103-DPB10101 DPA10103-DPB10201 DPA10103-DPB10202 DPA10103-DPB10401 DPA10103-DPB10402 DPA10103-DPB10501 DPA10103-DPB110501 DPA10103-DPB112601 DPA10103-DPB11501 DPA10103-DPB11601 DPA10103-DPB11801 DPA10103-DPB11901 DPA10103-DPB12301 DPA10103-DPB13101 DPA10103-DPB13401 DPA10103-DPB13901 DPA10103-DPB14001 DPA10103-DPB14101 DPA10103-DPB14801 DPA10103-DPB14901 DPA10103-DPB15001 DPA10103-DPB15101 DPA10103-DPB15501 DPA10103-DPB15901 DPA10103-DPB18001 DPA10104-DPB10101 DPA10104-DPB11501 DPA10105-DPB10101 DPA10105-DPB10401 DPA10105-DPB11801 DPA10105-DPB15001 DPA10106-DPB10101 DPA10201-DPB10101 DPA10201-DPB10201 DPA10201-DPB10202 DPA10201-DPB10401 DPA10201-DPB10501 DPA10201-DPB110601 DPA10201-DPB11501 DPA10201-DPB11601 DPA10201-DPB11901 DPA10201-DPB13401 DPA10201-DPB15501 DPA10202-DPB10101 DPA10202-DPB10201 DPA10202-DPB10202 DPA10202-DPB10401 DPA10202-DPB10501 DPA10202-DPB110601 DPA10202-DPB11101 DPA10202-DPB11301 DPA10202-DPB11801 DPA10202-DPB11901; note = HLAs: DPA10202-DPB13101 DPA10202-DPB13801 DPA10202-DPB15501 DPA10202-DPB16501 DPA10301-DPB10101 DPA10301-DPB10201 DPA10301-DPB10202 DPA10301-DPB10401 DPA10301-DPB10402 DPA10301-DPB110501 DPA10301-DPB110601 DPA10301-DPB11101 DPA10301-DPB11301 DPA10301-DPB11801 DPA10301-DPB12301 DPA10301-DPB13901 DPA10301-DPB14001 DPA10301-DPB14901 DPA10301-DPB15501 DPA10301-DPB16501 DPA10301-DPB17501 DPA10301-DPB18001 DPA10401-DPB10101 DPA10401-DPB10201 DPA10401-DPB10202 DPA10401-DPB10402 DPA10401-DPB10501 DPA10401-DPB110501 DPA10401-DPB14901
KEPPYLWIGWELLPDKWTVQ

SEQ ID NO: 7220 - protein, 20 aa, synthetic construct
  source 1..20: note = Seed: KEPPFLWMGYELHPDKWTVQ; note = HLAs: DPA10103-DPB10101 DPA10103-DPB10201 DPA10103-DPB10202 DPA10103-DPB10401 DPA10103-DPB10402 DPA10103-DPB10501 DPA10103-DPB110501 DPA10103-DPB112601 DPA10103-DPB11501 DPA10103-DPB11601 DPA10103-DPB11801 DPA10103-DPB11901 DPA10103-DPB12301 DPA10103-DPB13101 DPA10103-DPB13401 DPA10103-DPB13901 DPA10103-DPB14001 DPA10103-DPB14101 DPA10103-DPB14801 DPA10103-DPB14901 DPA10103-DPB15001 DPA10103-DPB15101 DPA10103-DPB15501 DPA10103-DPB15901 DPA10103-DPB18001 DPA10104-DPB10101 DPA10104-DPB11501 DPA10105-DPB10101 DPA10105-DPB10401 DPA10105-DPB11801 DPA10105-DPB15001 DPA10106-DPB10101 DPA10201-DPB10101 DPA10201-DPB10201 DPA10201-DPB10202 DPA10201-DPB10401 DPA10201-DPB10501 DPA10201-DPB110601 DPA10201-DPB11501 DPA10201-DPB11601 DPA10201-DPB11901 DPA10201-DPB13401 DPA10201-DPB15501 DPA10202-DPB10101 DPA10202-DPB10201 DPA10202-DPB10202 DPA10202-DPB10401 DPA10202-DPB10501 DPA10202-DPB110601 DPA10202-DPB11101 DPA10202-DPB11301 DPA10202-DPB11801 DPA10202-DPB11901 DPA10202-DPB13101 DPA10202-DPB13801; note = HLAs: DPA10202-DPB15501 DPA10202-DPB16501 DPA10301-DPB10101 DPA10301-DPB10201 DPA10301-DPB10202 DPA10301-DPB10401 DPA10301-DPB10402 DPA10301-DPB110501 DPA10301-DPB110601 DPA10301-DPB11101 DPA10301-DPB11301 DPA10301-DPB11801 DPA10301-DPB12301 DPA10301-DPB13901 DPA10301-DPB14001 DPA10301-DPB14901 DPA10301-DPB15501 DPA10301-DPB16501 DPA10301-DPB17501 DPA10301-DPB18001 DPA10401-DPB10101 DPA10401-DPB10201 DPA10401-DPB10202 DPA10401-DPB10402 DPA10401-DPB10501 DPA10401-DPB110501 DPA10401-DPB14901
KEPPFLWEGWELAPDKWTVQ

SEQ ID NO: 7221 - protein, 20 aa, synthetic construct
  source 1..20: note = Seed: KEPPFLWMGYELHPDKWTVQ; note = HLAs: DRB1_0101 DRB1_0405 DRB1_1001 DPA10103-DPB10101 DPA10103-DPB10201 DPA10103-DPB10202 DPA10103-DPB10401 DPA10103-DPB10402 DPA10103-DPB10501 DPA10103-DPB110501 DPA10103-DPB112601 DPA10103-DPB11501 DPA10103-DPB11601 DPA10103-DPB11801 DPA10103-DPB11901 DPA10103-DPB12301 DPA10103-DPB13101 DPA10103-DPB13401 DPA10103-DPB13901 DPA10103-DPB14001 DPA10103-DPB14101 DPA10103-DPB14801 DPA10103-DPB14901 DPA10103-DPB15001 DPA10103-DPB15101 DPA10103-DPB15501 DPA10103-DPB15901 DPA10103-DPB18001 DPA10104-DPB10101 DPA10104-DPB11501 DPA10105-DPB10101 DPA10105-DPB10401 DPA10105-DPB11801 DPA10105-DPB15001 DPA10106-DPB10101 DPA10201-DPB10101 DPA10201-DPB10201 DPA10201-DPB10202 DPA10201-DPB10401 DPA10201-DPB10501 DPA10201-DPB110601 DPA10201-DPB11501 DPA10201-DPB11601 DPA10201-DPB11901 DPA10201-DPB13401 DPA10201-DPB15501 DPA10202-DPB10101 DPA10202-DPB10201 DPA10202-DPB10202 DPA10202-DPB10401 DPA10202-DPB10501 DPA10202-DPB110601 DPA10202-DPB11101 DPA10202-DPB11301 DPA10202-DPB11801 DPA10202-DPB11901; note = HLAs: DPA10202-DPB13101 DPA10202-DPB13801 DPA10202-DPB15501 DPA10202-DPB16501 DPA10301-DPB10101 DPA10301-DPB10201 DPA10301-DPB10202 DPA10301-DPB10401 DPA10301-DPB10402 DPA10301-DPB110501 DPA10301-DPB110601 DPA10301-DPB11101 DPA10301-DPB11301 DPA10301-DPB11801 DPA10301-DPB12301 DPA10301-DPB13901 DPA10301-DPB14001 DPA10301-DPB14901 DPA10301-DPB15501 DPA10301-DPB16501 DPA10301-DPB17501 DPA10301-DPB18001 DPA10401-DPB10201 DPA10401-DPB10202 DPA10401-DPB10402 DPA10401-DPB10501 DPA10401-DPB110501 DPA10401-DPB14901
KEPPFLWAGAELLPDKWTVQ

SEQ ID NO: 7222 - protein, 20 aa, synthetic construct
  source 1..20: note = Seed: KEPPFLWMGYELHPDKWTVQ; note = HLAs: DRB1_0101 DPA10103-DPB10101 DPA10103-DPB10201 DPA10103-DPB10202 DPA10103-DPB10401 DPA10103-DPB10402 DPA10103-DPB10501 DPA10103-DPB110501 DPA10103-DPB112601 DPA10103-DPB11501 DPA10103-DPB11601 DPA10103-DPB11801 DPA10103-DPB11901 DPA10103-DPB12301 DPA10103-DPB13101 DPA10103-DPB13401 DPA10103-DPB13901 DPA10103-DPB14001 DPA10103-DPB14101 DPA10103-DPB14801 DPA10103-DPB14901 DPA10103-DPB15001 DPA10103-DPB15101 DPA10103-DPB15501 DPA10103-DPB15901 DPA10103-DPB18001 DPA10104-DPB10101 DPA10104-DPB11501 DPA10105-DPB10101 DPA10105-DPB10401 DPA10105-DPB11801 DPA10105-DPB15001 DPA10106-DPB10101 DPA10201-DPB10101 DPA10201-DPB10201 DPA10201-DPB10202 DPA10201-DPB10401 DPA10201-DPB10501 DPA10201-DPB110601 DPA10201-DPB11501 DPA10201-DPB11601 DPA10201-DPB11901 DPA10201-DPB13401 DPA10201-DPB15501 DPA10202-DPB10101 DPA10202-DPB10201 DPA10202-DPB10202 DPA10202-DPB10401 DPA10202-DPB10501 DPA10202-DPB110601 DPA10202-DPB11101 DPA10202-DPB11301 DPA10202-DPB11801 DPA10202-DPB11901 DPA10202-DPB13101; note = HLAs: DPA10202-DPB13801 DPA10202-DPB15501 DPA10202-DPB16501 DPA10301-DPB10101 DPA10301-DPB10201 DPA10301-DPB10202 DPA10301-DPB10401 DPA10301-DPB10402 DPA10301-DPB110501 DPA10301-DPB110601 DPA10301-DPB11101 DPA10301-DPB11301 DPA10301-DPB11801 DPA10301-DPB12301 DPA10301-DPB13901 DPA10301-DPB14001 DPA10301-DPB14901 DPA10301-DPB15501 DPA10301-DPB16501 DPA10301-DPB17501 DPA10301-DPB18001 DPA10401-DPB10101 DPA10401-DPB10201 DPA10401-DPB10202 DPA10401-DPB10402 DPA10401-DPB10501 DPA10401-DPB110501 DPA10401-DPB14901
KEPPFLWNGMELIPDKWTVQ

SEQ ID NO: 7223 - protein, 20 aa, synthetic construct
  source 1..20: note = Seed: KEPPFLWMGYELHPDKWTVQ; note = HLAs: DPA10103-DPB10101 DPA10103-DPB10201 DPA10103-DPB10202 DPA10103-DPB10401 DPA10103-DPB10402 DPA10103-DPB10501 DPA10103-DPB110501 DPA10103-DPB112601 DPA10103-DPB11501 DPA10103-DPB11601 DPA10103-DPB11801 DPA10103-DPB11901 DPA10103-DPB12301 DPA10103-DPB13101 DPA10103-DPB13401 DPA10103-DPB13901 DPA10103-DPB14001 DPA10103-DPB14101 DPA10103-DPB14801 DPA10103-DPB14901 DPA10103-DPB15001 DPA10103-DPB15101 DPA10103-DPB15501 DPA10103-DPB15901 DPA10103-DPB18001 DPA10104-DPB10101 DPA10104-DPB11501 DPA10105-DPB10101 DPA10105-DPB10401 DPA10105-DPB11801 DPA10105-DPB15001 DPA10106-DPB10101 DPA10201-DPB10101 DPA10201-DPB10201 DPA10201-DPB10202 DPA10201-DPB10401 DPA10201-DPB10501 DPA10201-DPB110601 DPA10201-DPB11501 DPA10201-DPB11601 DPA10201-DPB11901 DPA10201-DPB13401 DPA10201-DPB15501 DPA10202-DPB10101 DPA10202-DPB10201 DPA10202-DPB10202 DPA10202-DPB10401 DPA10202-DPB10501 DPA10202-DPB110601 DPA10202-DPB11101 DPA10202-DPB11301 DPA10202-DPB11801 DPA10202-DPB11901 DPA10202-DPB13101 DPA10202-DPB13801; note = HLAs: DPA10202-DPB15501 DPA10202-DPB16501 DPA10301-DPB10101 DPA10301-DPB10201 DPA10301-DPB10202 DPA10301-DPB10401 DPA10301-DPB10402 DPA10301-DPB110501 DPA10301-DPB110601 DPA10301-DPB11101 DPA10301-DPB11301 DPA10301-DPB11801 DPA10301-DPB12301 DPA10301-DPB13901 DPA10301-DPB14001 DPA10301-DPB14901 DPA10301-DPB15501 DPA10301-DPB16501 DPA10301-DPB17501 DPA10301-DPB18001 DPA10401-DPB10101 DPA10401-DPB10201 DPA10401-DPB10202 DPA10401-DPB10402 DPA10401-DPB10501 DPA10401-DPB110501 DPA10401-DPB14901
KEPPFLWDGYELVPDKWTVQ

SEQ ID NO: 7224 - protein, 20 aa, synthetic construct
  source 1..20: note = Seed: KEPPFLWMGYELHPDKWTVQ; note = HLAs: DPA10103-DPB10101 DPA10103-DPB10201 DPA10103-DPB10202 DPA10103-DPB10401 DPA10103-DPB10402 DPA10103-DPB10501 DPA10103-DPB110501 DPA10103-DPB112601 DPA10103-DPB11501 DPA10103-DPB11601 DPA10103-DPB11801 DPA10103-DPB11901 DPA10103-DPB12301 DPA10103-DPB13101 DPA10103-DPB13401 DPA10103-DPB13901 DPA10103-DPB14001 DPA10103-DPB14101 DPA10103-DPB14801 DPA10103-DPB14901 DPA10103-DPB15001 DPA10103-DPB15101 DPA10103-DPB15501 DPA10103-DPB15901 DPA10103-DPB18001 DPA10104-DPB10101 DPA10104-DPB11501 DPA10105-DPB10101 DPA10105-DPB10401 DPA10105-DPB11801 DPA10105-DPB15001 DPA10106-DPB10101 DPA10201-DPB10101 DPA10201-DPB10201 DPA10201-DPB10202 DPA10201-DPB10401 DPA10201-DPB10501 DPA10201-DPB110601 DPA10201-DPB11501 DPA10201-DPB11601 DPA10201-DPB11901 DPA10201-DPB13401 DPA10201-DPB15501 DPA10202-DPB10101 DPA10202-DPB10201 DPA10202-DPB10202 DPA10202-DPB10401 DPA10202-DPB10501 DPA10202-DPB110601 DPA10202-DPB11301 DPA10202-DPB11801 DPA10202-DPB11901 DPA10202-DPB13101 DPA10202-DPB13801 DPA10202-DPB15501; note = HLAs: DPA10202-DPB16501 DPA10301-DPB10101 DPA10301-DPB10201 DPA10301-DPB10202 DPA10301-DPB10401 DPA10301-DPB10402 DPA10301-DPB110501 DPA10301-DPB110601 DPA10301-DPB11101 DPA10301-DPB11301 DPA10301-DPB11801 DPA10301-DPB12301 DPA10301-DPB13901 DPA10301-DPB14001 DPA10301-DPB14901 DPA10301-DPB15501 DPA10301-DPB16501 DPA10301-DPB17501 DPA10301-DPB18001 DPA10401-DPB10101 DPA10401-DPB10201 DPA10401-DPB10202 DPA10401-DPB10402 DPA10401-DPB10501 DPA10401-DPB110501 DPA10401-DPB14901
KEPPLLWEGYELVPDKWTVQ

SEQ ID NO: 7225 - protein, 20 aa, synthetic construct
  source 1..20: note = Seed: KEPPFLWMGYELHPDKWTVQ; note = HLAs: DPA10103-DPB10101 DPA10103-DPB10201 DPA10103-DPB10202 DPA10103-DPB10401 DPA10103-DPB10402 DPA10103-DPB10501 DPA10103-DPB110501 DPA10103-DPB112601 DPA10103-DPB11501 DPA10103-DPB11601 DPA10103-DPB11801 DPA10103-DPB11901 DPA10103-DPB12301 DPA10103-DPB13101 DPA10103-DPB13401 DPA10103-DPB13901 DPA10103-DPB14001 DPA10103-DPB14101 DPA10103-DPB14801 DPA10103-DPB14901 DPA10103-DPB15101 DPA10103-DPB15901 DPA10103-DPB18001 DPA10104-DPB10101 DPA10104-DPB11501 DPA10105-DPB10101 DPA10105-DPB10401 DPA10105-DPB11801 DPA10106-DPB10101 DPA10201-DPB10101 DPA10201-DPB10201 DPA10201-DPB10202 DPA10201-DPB10401 DPA10201-DPB10501 DPA10201-DPB110601 DPA10201-DPB11501 DPA10201-DPB11601 DPA10201-DPB11901 DPA10201-DPB13401 DPA10201-DPB15501 DPA10202-DPB10201 DPA10202-DPB10202 DPA10202-DPB10401 DPA10202-DPB10501 DPA10202-DPB110601 DPA10202-DPB11301 DPA10202-DPB11801 DPA10202-DPB11901 DPA10202-DPB13101 DPA10202-DPB13801 DPA10202-DPB15501 DPA10301-DPB10201 DPA10301-DPB10202 DPA10301-DPB10401 DPA10301-DPB10402; note = HLAs: DPA10301-DPB110501 DPA10301-DPB110601 DPA10301-DPB11801 DPA10301-DPB12301 DPA10301-DPB13901 DPA10301-DPB14001 DPA10301-DPB14901 DPA10301-DPB16501 DPA10301-DPB17501 DPA10301-DPB18001 DPA10401-DPB10101 DPA10401-DPB10201 DPA10401-DPB10202 DPA10401-DPB10402 DPA10401-DPB10501 DPA10401-DPB110501 DPA10401-DPB14901
KEPPILWRGFELLPDKWTVQ

SEQ ID NO: 7226 - protein, 14 aa, synthetic construct
  source 1..14: note = Seed: PPFLWMGYELHPDK; note = HLAs: DRB1_1001 DPA10103-DPB10101 DPA10103-DPB10201 DPA10103-DPB10202 DPA10103-DPB10401 DPA10103-DPB112601 DPA10103-DPB11501 DPA10103-DPB11601 DPA10103-DPB11901 DPA10103-DPB12301 DPA10103-DPB13101 DPA10103-DPB13401 DPA10103-DPB13901 DPA10103-DPB14001 DPA10103-DPB14101 DPA10103-DPB14801 DPA10103-DPB15001 DPA10103-DPB15901 DPA10104-DPB10101 DPA10104-DPB11501 DPA10105-DPB10101 DPA10105-DPB10401 DPA10105-DPB15001 DPA10106-DPB10101 DPA10201-DPB10101 DPA10201-DPB110601 DPA10201-DPB11501 DPA10201-DPB11601 DPA10201-DPB11901 DPA10202-DPB10101 DPA10202-DPB10201 DPA10202-DPB10202 DPA10202-DPB10401 DPA10202-DPB110601 DPA10202-DPB11901 DPA10202-DPB13101 DPA10202-DPB16501 DPA10301-DPB10101 DPA10301-DPB10201 DPA10301-DPB10202 DPA10301-DPB10401 DPA10301-DPB10402 DPA10301-DPB110501 DPA10301-DPB110601 DPA10301-DPB11801 DPA10301-DPB12301 DPA10301-DPB13901 DPA10301-DPB14001 DPA10301-DPB14901 DPA10301-DPB15501 DPA10301-DPB16501 DPA10301-DPB17501 DPA10301-DPB18001 DPA10401-DPB10101 DPA10401-DPB10201; note = HLAs: DPA10401-DPB10202 DPA10401-DPB10402 DPA10401-DPB10501 DPA10401-DPB110501 DPA10401-DPB14901
PPFLWTGLELSPDK

SEQ ID NO: 7227 - protein, 20 aa, synthetic construct
  source 1..20: note = Seed: KEPPFLWMGYELHPDKWTVQ; note = HLAs: DRB1_0101 DPA10103-DPB10101 DPA10103-DPB10201 DPA10103-DPB10202 DPA10103-DPB10401 DPA10103-DPB10402 DPA10103-DPB10501 DPA10103-DPB110501 DPA10103-DPB112601 DPA10103-DPB11501 DPA10103-DPB11601 DPA10103-DPB11801 DPA10103-DPB11901 DPA10103-DPB12301 DPA10103-DPB13101 DPA10103-DPB13401 DPA10103-DPB13901 DPA10103-DPB14001 DPA10103-DPB14101 DPA10103-DPB14801 DPA10103-DPB14901 DPA10103-DPB15001 DPA10103-DPB15101 DPA10103-DPB15501 DPA10103-DPB15901 DPA10103-DPB18001 DPA10104-DPB10101 DPA10104-DPB11501 DPA10105-DPB10101 DPA10105-DPB10401 DPA10105-DPB11801 DPA10105-DPB15001 DPA10106-DPB10101 DPA10201-DPB10101 DPA10201-DPB10201 DPA10201-DPB10202 DPA10201-DPB10401 DPA10201-DPB10501 DPA10201-DPB110601 DPA10201-DPB11501 DPA10201-DPB11601 DPA10201-DPB11901 DPA10201-DPB13401 DPA10201-DPB15501 DPA10202-DPB10101 DPA10202-DPB10201 DPA10202-DPB10202 DPA10202-DPB10401 DPA10202-DPB10501 DPA10202-DPB110601 DPA10202-DPB11101 DPA10202-DPB11301 DPA10202-DPB11801 DPA10202-DPB11901 DPA10202-DPB13101; note = HLAs: DPA10202-DPB13801 DPA10202-DPB15501 DPA10202-DPB16501 DPA10301-DPB10101 DPA10301-DPB10201 DPA10301-DPB10202 DPA10301-DPB10401 DPA10301-DPB10402 DPA10301-DPB110501 DPA10301-DPB110601 DPA10301-DPB11101 DPA10301-DPB11301 DPA10301-DPB11801 DPA10301-DPB12301 DPA10301-DPB13901 DPA10301-DPB14001 DPA10301-DPB14901 DPA10301-DPB15501 DPA10301-DPB16501 DPA10301-DPB17501 DPA10301-DPB18001 DPA10401-DPB10101 DPA10401-DPB10201 DPA10401-DPB10202 DPA10401-DPB10402 DPA10401-DPB10501 DPA10401-DPB110501 DPA10401-DPB14901
KEPPFLWCGYELLPDKWTVQ

SEQ ID NO: 7228 - protein, 20 aa, synthetic construct
  source 1..20: note = Seed: KEPPFLWMGYELHPDKWTVQ; note = HLAs: DRB1_1001 DPA10103-DPB10101 DPA10103-DPB10201 DPA10103-DPB10202 DPA10103-DPB10401 DPA10103-DPB10402 DPA10103-DPB10501 DPA10103-DPB110501 DPA10103-DPB112601 DPA10103-DPB11501 DPA10103-DPB11601 DPA10103-DPB11801 DPA10103-DPB11901 DPA10103-DPB12301 DPA10103-DPB13101 DPA10103-DPB13401 DPA10103-DPB13901 DPA10103-DPB14001 DPA10103-DPB14101 DPA10103-DPB14801 DPA10103-DPB14901 DPA10103-DPB15001 DPA10103-DPB15101 DPA10103-DPB15501 DPA10103-DPB15901 DPA10103-DPB18001 DPA10104-DPB10101 DPA10104-DPB11501 DPA10105-DPB10101 DPA10105-DPB10401 DPA10105-DPB11801 DPA10105-DPB15001 DPA10106-DPB10101 DPA10201-DPB10101 DPA10201-DPB10201 DPA10201-DPB10202 DPA10201-DPB10401 DPA10201-DPB10501 DPA10201-DPB110601 DPA10201-DPB11501 DPA10201-DPB11601 DPA10201-DPB11901 DPA10201-DPB13401 DPA10201-DPB15501 DPA10202-DPB10101 DPA10202-DPB10201 DPA10202-DPB10202 DPA10202-DPB10401 DPA10202-DPB10501 DPA10202-DPB110601 DPA10202-DPB11101 DPA10202-DPB11301 DPA10202-DPB11801 DPA10202-DPB11901 DPA10202-DPB13101; note = HLAs: DPA10202-DPB13801 DPA10202-DPB15501 DPA10202-DPB16501 DPA10301-DPB10101 DPA10301-DPB10201 DPA10301-DPB10202 DPA10301-DPB10401 DPA10301-DPB10402 DPA10301-DPB110501 DPA10301-DPB110601 DPA10301-DPB11101 DPA10301-DPB11301 DPA10301-DPB11801 DPA10301-DPB12301 DPA10301-DPB13901 DPA10301-DPB14001 DPA10301-DPB14901 DPA10301-DPB15501 DPA10301-DPB16501 DPA10301-DPB17501 DPA10301-DPB18001 DPA10401-DPB10101 DPA10401-DPB10201 DPA10401-DPB10202 DPA10401-DPB10402 DPA10401-DPB10501 DPA10401-DPB110501 DPA10401-DPB14901
KEPPYLWAGFELEPDKWTVQ

SEQ ID NO: 7229 - protein, 20 aa, synthetic construct
  source 1..20: note = Seed: KEPPFLWMGYELHPDKWTVQ; note = HLAs: DRB1_0101 DRB1_1001 DPA10103-DPB10101 DPA10103-DPB10201 DPA10103-DPB10202 DPA10103-DPB10401 DPA10103-DPB10402 DPA10103-DPB10501 DPA10103-DPB110501 DPA10103-DPB112601 DPA10103-DPB11501 DPA10103-DPB11601 DPA10103-DPB11801 DPA10103-DPB11901 DPA10103-DPB12301 DPA10103-DPB13101 DPA10103-DPB13401 DPA10103-DPB13901 DPA10103-DPB14001 DPA10103-DPB14101 DPA10103-DPB14801 DPA10103-DPB14901 DPA10103-DPB15001 DPA10103-DPB15101 DPA10103-DPB15501 DPA10103-DPB15901 DPA10103-DPB18001 DPA10104-DPB10101 DPA10104-DPB11501 DPA10105-DPB10101 DPA10105-DPB10401 DPA10105-DPB11801 DPA10105-DPB15001 DPA10106-DPB10101 DPA10201-DPB10101 DPA10201-DPB10201 DPA10201-DPB10202 DPA10201-DPB10401 DPA10201-DPB10501 DPA10201-DPB110601 DPA10201-DPB11501 DPA10201-DPB11601 DPA10201-DPB11901 DPA10201-DPB13401 DPA10201-DPB15501 DPA10202-DPB10101 DPA10202-DPB10201 DPA10202-DPB10202 DPA10202-DPB10401 DPA10202-DPB10501 DPA10202-DPB110601 DPA10202-DPB11101 DPA10202-DPB11301 DPA10202-DPB11801 DPA10202-DPB11901; note = HLAs: DPA10202-DPB13101 DPA10202-DPB13801 DPA10202-DPB15501 DPA10202-DPB16501 DPA10301-DPB10101 DPA10301-DPB10201 DPA10301-DPB10202 DPA10301-DPB10401 DPA10301-DPB10402 DPA10301-DPB110501 DPA10301-DPB110601 DPA10301-DPB11101 DPA10301-DPB11301 DPA10301-DPB11801 DPA10301-DPB12301 DPA10301-DPB13901 DPA10301-DPB14001 DPA10301-DPB14901 DPA10301-DPB15501 DPA10301-DPB16501 DPA10301-DPB17501 DPA10301-DPB18001 DPA10401-DPB10101 DPA10401-DPB10201 DPA10401-DPB10202 DPA10401-DPB10402 DPA10401-DPB10501 DPA10401-DPB110501 DPA10401-DPB14901
KEPPWLWLGFELVPDKWTVQ

SEQ ID NO: 7230 - protein, 20 aa, synthetic construct
  source 1..20: note = Seed: KEPPFLWMGYELHPDKWTVQ; note = HLAs: DRB1_0101 DRB1_0405 DRB1_1001 DPA10103-DPB10101 DPA10103-DPB10201 DPA10103-DPB10202 DPA10103-DPB10401 DPA10103-DPB10402 DPA10103-DPB10501 DPA10103-DPB110501 DPA10103-DPB112601 DPA10103-DPB11501 DPA10103-DPB11601 DPA10103-DPB11801 DPA10103-DPB11901 DPA10103-DPB12301 DPA10103-DPB13101 DPA10103-DPB13401 DPA10103-DPB13901 DPA10103-DPB14001 DPA10103-DPB14101 DPA10103-DPB14801 DPA10103-DPB14901 DPA10103-DPB15001 DPA10103-DPB15101 DPA10103-DPB15501 DPA10103-DPB15901 DPA10103-DPB18001 DPA10104-DPB10101 DPA10104-DPB11501 DPA10105-DPB10101 DPA10105-DPB10401 DPA10105-DPB11801 DPA10105-DPB15001 DPA10106-DPB10101 DPA10201-DPB10101 DPA10201-DPB10201 DPA10201-DPB10202 DPA10201-DPB10401 DPA10201-DPB10501 DPA10201-DPB110601 DPA10201-DPB11501 DPA10201-DPB11601 DPA10201-DPB11901 DPA10201-DPB13401 DPA10201-DPB15501 DPA10202-DPB10101 DPA10202-DPB10201 DPA10202-DPB10202 DPA10202-DPB10401 DPA10202-DPB10501 DPA10202-DPB110601 DPA10202-DPB11101 DPA10202-DPB11301 DPA10202-DPB11801 DPA10202-DPB11901; note = HLAs: DPA10202-DPB13101 DPA10202-DPB13801 DPA10202-DPB15501 DPA10202-DPB16501 DPA10301-DPB10101 DPA10301-DPB10201 DPA10301-DPB10202 DPA10301-DPB10401 DPA10301-DPB10402 DPA10301-DPB110501 DPA10301-DPB110601 DPA10301-DPB11101 DPA10301-DPB11301 DPA10301-DPB11801 DPA10301-DPB12301 DPA10301-DPB13901 DPA10301-DPB14001 DPA10301-DPB14901 DPA10301-DPB15501 DPA10301-DPB16501 DPA10301-DPB17501 DPA10301-DPB18001 DPA10401-DPB10101 DPA10401-DPB10201 DPA10401-DPB10202 DPA10401-DPB10402 DPA10401-DPB10501 DPA10401-DPB110501 DPA10401-DPB14901
KEPPFLWSGLELSPDKWTVQ

SEQ ID NO: 7231 - protein, 20 aa, synthetic construct
  source 1..20: note = Seed: KEPPFLWMGYELHPDKWTVQ; note = HLAs: DRB1_0101 DRB1_0405 DRB1_1001 DPA10103-DPB10101 DPA10103-DPB10201 DPA10103-DPB10202 DPA10103-DPB10401 DPA10103-DPB10402 DPA10103-DPB10501 DPA10103-DPB110501 DPA10103-DPB112601 DPA10103-DPB11501 DPA10103-DPB11601 DPA10103-DPB11801 DPA10103-DPB11901 DPA10103-DPB12301 DPA10103-DPB13101 DPA10103-DPB13401 DPA10103-DPB13901 DPA10103-DPB14001 DPA10103-DPB14101 DPA10103-DPB14801 DPA10103-DPB14901 DPA10103-DPB15001 DPA10103-DPB15101 DPA10103-DPB15501 DPA10103-DPB15901 DPA10103-DPB18001 DPA10104-DPB10101 DPA10104-DPB11501 DPA10105-DPB10101 DPA10105-DPB10401 DPA10105-DPB11801 DPA10105-DPB15001 DPA10106-DPB10101 DPA10201-DPB10101 DPA10201-DPB10201 DPA10201-DPB10202 DPA10201-DPB10401 DPA10201-DPB10501 DPA10201-DPB110601 DPA10201-DPB11501 DPA10201-DPB11601 DPA10201-DPB11901 DPA10201-DPB15501 DPA10202-DPB10101 DPA10202-DPB10201 DPA10202-DPB10202 DPA10202-DPB10401 DPA10202-DPB10501 DPA10202-DPB110601 DPA10202-DPB11101 DPA10202-DPB11301 DPA10202-DPB11801 DPA10202-DPB11901 DPA10202-DPB13101; note = HLAs: DPA10202-DPB13801 DPA10202-DPB15501 DPA10202-DPB16501 DPA10301-DPB10101 DPA10301-DPB10201 DPA10301-DPB10202 DPA10301-DPB10401 DPA10301-DPB10402 DPA10301-DPB110501 DPA10301-DPB110601 DPA10301-DPB11101 DPA10301-DPB11301 DPA10301-DPB11801 DPA10301-DPB12301 DPA10301-DPB13901 DPA10301-DPB14001 DPA10301-DPB14901 DPA10301-DPB15501 DPA10301-DPB16501 DPA10301-DPB17501 DPA10301-DPB18001 DPA10401-DPB10101 DPA10401-DPB10201 DPA10401-DPB10202 DPA10401-DPB10402 DPA10401-DPB10501 DPA10401-DPB110501 DPA10401-DPB14901
KEPPFLWVGAELVPDKWTVQ

SEQ ID NO: 7232 - protein, 14 aa, synthetic construct
  source 1..14: note = Seed: PPFLWMGYELHPDK; note = HLAs: DRB1_1001 DPA10103-DPB10101 DPA10103-DPB10201 DPA10103-DPB10202 DPA10103-DPB10401 DPA10103-DPB112601 DPA10103-DPB11501 DPA10103-DPB11601 DPA10103-DPB11901 DPA10103-DPB12301 DPA10103-DPB13101 DPA10103-DPB13401 DPA10103-DPB13901 DPA10103-DPB14001 DPA10103-DPB14101 DPA10103-DPB14801 DPA10103-DPB15001 DPA10103-DPB15901 DPA10104-DPB10101 DPA10104-DPB11501 DPA10105-DPB10101 DPA10105-DPB10401 DPA10105-DPB15001 DPA10106-DPB10101 DPA10201-DPB10101 DPA10201-DPB110601 DPA10201-DPB11501 DPA10201-DPB11601 DPA10201-DPB11901 DPA10202-DPB10101 DPA10202-DPB10201 DPA10202-DPB10202 DPA10202-DPB10401 DPA10202-DPB110601 DPA10202-DPB11901 DPA10202-DPB13101 DPA10202-DPB16501 DPA10301-DPB10101 DPA10301-DPB10201 DPA10301-DPB10202 DPA10301-DPB10401 DPA10301-DPB10402 DPA10301-DPB110501 DPA10301-DPB110601 DPA10301-DPB11801 DPA10301-DPB12301 DPA10301-DPB13901 DPA10301-DPB14001 DPA10301-DPB14901 DPA10301-DPB15501 DPA10301-DPB16501 DPA10301-DPB17501 DPA10301-DPB18001 DPA10401-DPB10101 DPA10401-DPB10201; note = HLAs: DPA10401-DPB10202 DPA10401-DPB10402 DPA10401-DPB10501 DPA10401-DPB110501 DPA10401-DPB14901
PPILWIGFELSPDK

SEQ ID NO: 7233 - protein, 20 aa, synthetic construct
  source 1..20: note = Seed: KEPPFLWMGYELHPDKWTVQ; note = HLAs: DRB1_0101 DPA10103-DPB10101 DPA10103-DPB10201 DPA10103-DPB10202 DPA10103-DPB10401 DPA10103-DPB10402 DPA10103-DPB10501 DPA10103-DPB110501 DPA10103-DPB112601 DPA10103-DPB11501 DPA10103-DPB11601 DPA10103-DPB11801 DPA10103-DPB11901 DPA10103-DPB12301 DPA10103-DPB13101 DPA10103-DPB13401 DPA10103-DPB13901 DPA10103-DPB14001 DPA10103-DPB14101 DPA10103-DPB14801 DPA10103-DPB14901 DPA10103-DPB15001 DPA10103-DPB15101 DPA10103-DPB15501 DPA10103-DPB15901 DPA10103-DPB18001 DPA10104-DPB10101 DPA10104-DPB11501 DPA10105-DPB10101 DPA10105-DPB10401 DPA10105-DPB11801 DPA10105-DPB15001 DPA10106-DPB10101 DPA10201-DPB10101 DPA10201-DPB10201 DPA10201-DPB10202 DPA10201-DPB10401 DPA10201-DPB10501 DPA10201-DPB110601 DPA10201-DPB11501 DPA10201-DPB11601 DPA10201-DPB11901 DPA10201-DPB13401 DPA10201-DPB15501 DPA10202-DPB10101 DPA10202-DPB10201 DPA10202-DPB10202 DPA10202-DPB10401 DPA10202-DPB10501 DPA10202-DPB110601 DPA10202-DPB11301 DPA10202-DPB11901 DPA10202-DPB13101 DPA10202-DPB13801 DPA10202-DPB15501; note = HLAs: DPA10202-DPB16501 DPA10301-DPB10101 DPA10301-DPB10201 DPA10301-DPB10202 DPA10301-DPB10401 DPA10301-DPB10402 DPA10301-DPB110501 DPA10301-DPB110601 DPA10301-DPB11101 DPA10301-DPB11301 DPA10301-DPB11801 DPA10301-DPB12301 DPA10301-DPB13901 DPA10301-DPB14001 DPA10301-DPB14901 DPA10301-DPB15501 DPA10301-DPB16501 DPA10301-DPB17501 DPA10301-DPB18001 DPA10401-DPB10101 DPA10401-DPB10201 DPA10401-DPB10202 DPA10401-DPB10402 DPA10401-DPB10501 DPA10401-DPB110501 DPA10401-DPB14901
KEPPWLWDGFELIPDKWTVQ

SEQ ID NO: 7234 - protein, 14 aa, synthetic construct
  source 1..14: note = Seed: PPFLWMGYELHPDK; note = HLAs: DPA10103-DPB10101 DPA10103-DPB10201 DPA10103-DPB10202 DPA10103-DPB10401 DPA10103-DPB112601 DPA10103-DPB11501 DPA10103-DPB11601 DPA10103-DPB11901 DPA10103-DPB12301 DPA10103-DPB13101 DPA10103-DPB13401 DPA10103-DPB13901 DPA10103-DPB14001 DPA10103-DPB14101 DPA10103-DPB14801 DPA10103-DPB15001 DPA10103-DPB15901 DPA10104-DPB10101 DPA10104-DPB11501 DPA10105-DPB10101 DPA10105-DPB10401 DPA10105-DPB15001 DPA10106-DPB10101 DPA10201-DPB10101 DPA10201-DPB110601 DPA10201-DPB11501 DPA10201-DPB11601 DPA10201-DPB11901 DPA10202-DPB10101 DPA10202-DPB10201 DPA10202-DPB10202 DPA10202-DPB10401 DPA10202-DPB110601 DPA10202-DPB11901 DPA10202-DPB13101 DPA10202-DPB16501 DPA10301-DPB10101 DPA10301-DPB10201 DPA10301-DPB10202 DPA10301-DPB10401 DPA10301-DPB10402 DPA10301-DPB110501 DPA10301-DPB110601 DPA10301-DPB11801 DPA10301-DPB12301 DPA10301-DPB13901 DPA10301-DPB14001 DPA10301-DPB14901 DPA10301-DPB16501 DPA10301-DPB17501 DPA10301-DPB18001 DPA10401-DPB10101 DPA10401-DPB10201 DPA10401-DPB10202; note = HLAs: DPA10401-DPB10402 DPA10401-DPB10501 DPA10401-DPB110501 DPA10401-DPB14901
PPFLWHGFELRPDK

SEQ ID NO: 7235 - protein, 14 aa, synthetic construct
  source 1..14: note = Seed: PPFLWMGYELHPDK; note = HLAs: DRB1_1001 DPA10103-DPB10101 DPA10103-DPB10201 DPA10103-DPB10202 DPA10103-DPB10401 DPA10103-DPB112601 DPA10103-DPB11501 DPA10103-DPB11601 DPA10103-DPB11901 DPA10103-DPB12301 DPA10103-DPB13101 DPA10103-DPB13401 DPA10103-DPB13901 DPA10103-DPB14001 DPA10103-DPB14101 DPA10103-DPB14801 DPA10103-DPB15001 DPA10103-DPB15901 DPA10104-DPB10101 DPA10104-DPB11501 DPA10105-DPB10101 DPA10105-DPB10401 DPA10105-DPB15001 DPA10106-DPB10101 DPA10201-DPB10101 DPA10201-DPB110601 DPA10201-DPB11501 DPA10201-DPB11601 DPA10201-DPB11901 DPA10202-DPB10101 DPA10202-DPB10201 DPA10202-DPB10202 DPA10202-DPB10401 DPA10202-DPB110601 DPA10202-DPB11901 DPA10202-DPB13101 DPA10202-DPB16501 DPA10301-DPB10101 DPA10301-DPB10201 DPA10301-DPB10202 DPA10301-DPB10401 DPA10301-DPB10402 DPA10301-DPB110501 DPA10301-DPB110601 DPA10301-DPB11801 DPA10301-DPB12301 DPA10301-DPB13901 DPA10301-DPB14001 DPA10301-DPB14901 DPA10301-DPB15501 DPA10301-DPB16501 DPA10301-DPB17501 DPA10301-DPB18001 DPA10401-DPB10101 DPA10401-DPB10201; note = HLAs: DPA10401-DPB10202 DPA10401-DPB10402 DPA10401-DPB10501 DPA10401-DPB110501 DPA10401-DPB14901
PPFLWSGLELTPDK

SEQ ID NO: 7236 - protein, 14 aa, synthetic construct
  source 1..14: note = Seed: PPFLWMGYELHPDK; note = HLAs: DPA10103-DPB10101 DPA10103-DPB10201 DPA10103-DPB10202 DPA10103-DPB10401 DPA10103-DPB112601 DPA10103-DPB11501 DPA10103-DPB11601 DPA10103-DPB11901 DPA10103-DPB12301 DPA10103-DPB13101 DPA10103-DPB13401 DPA10103-DPB13901 DPA10103-DPB14001 DPA10103-DPB14101 DPA10103-DPB14801 DPA10103-DPB15001 DPA10103-DPB15901 DPA10104-DPB10101 DPA10104-DPB11501 DPA10105-DPB10101 DPA10105-DPB10401 DPA10105-DPB15001 DPA10106-DPB10101 DPA10201-DPB10101 DPA10201-DPB110601 DPA10201-DPB11501 DPA10201-DPB11601 DPA10201-DPB11901 DPA10202-DPB10101 DPA10202-DPB10201 DPA10202-DPB10202 DPA10202-DPB10401 DPA10202-DPB110601 DPA10202-DPB11901 DPA10202-DPB13101 DPA10202-DPB16501 DPA10301-DPB10101 DPA10301-DPB10201 DPA10301-DPB10202 DPA10301-DPB10401 DPA10301-DPB10402 DPA10301-DPB110501 DPA10301-DPB110601 DPA10301-DPB11801 DPA10301-DPB12301 DPA10301-DPB13901 DPA10301-DPB14001 DPA10301-DPB14901 DPA10301-DPB15501 DPA10301-DPB16501 DPA10301-DPB17501 DPA10301-DPB18001 DPA10401-DPB10101 DPA10401-DPB10201; note = HLAs: DPA10401-DPB10202 DPA10401-DPB10402 DPA10401-DPB10501 DPA10401-DPB110501 DPA10401-DPB14901
PPWLWSGWELIPDK

SEQ ID NO: 7237 - protein, 14 aa, synthetic construct
  source 1..14: note = Seed: PPFLWMGYELHPDK; note = HLAs: DPA10103-DPB10101 DPA10103-DPB10201 DPA10103-DPB10202 DPA10103-DPB10401 DPA10103-DPB112601 DPA10103-DPB11501 DPA10103-DPB11601 DPA10103-DPB11901 DPA10103-DPB12301 DPA10103-DPB13101 DPA10103-DPB13401 DPA10103-DPB13901 DPA10103-DPB14001 DPA10103-DPB14101 DPA10103-DPB14801 DPA10103-DPB15001 DPA10103-DPB15901 DPA10104-DPB10101 DPA10104-DPB11501 DPA10105-DPB10101 DPA10105-DPB10401 DPA10105-DPB15001 DPA10106-DPB10101 DPA10201-DPB10101 DPA10201-DPB110601 DPA10201-DPB11501 DPA10201-DPB11601 DPA10201-DPB11901 DPA10202-DPB10101 DPA10202-DPB10201 DPA10202-DPB10202 DPA10202-DPB10401 DPA10202-DPB110601 DPA10202-DPB11901 DPA10202-DPB13101 DPA10202-DPB16501 DPA10301-DPB10101 DPA10301-DPB10201 DPA10301-DPB10202 DPA10301-DPB10401 DPA10301-DPB10402 DPA10301-DPB110501 DPA10301-DPB110601 DPA10301-DPB11801 DPA10301-DPB12301 DPA10301-DPB13901 DPA10301-DPB14001 DPA10301-DPB14901 DPA10301-DPB15501 DPA10301-DPB16501 DPA10301-DPB17501 DPA10301-DPB18001 DPA10401-DPB10101 DPA10401-DPB10201; note = HLAs: DPA10401-DPB10202 DPA10401-DPB10402 DPA10401-DPB10501 DPA10401-DPB110501 DPA10401-DPB14901
PPFLWTGWELNPDK

SEQ ID NO: 7238 - protein, 20 aa, synthetic construct
  source 1..20: note = Seed: KEPPFLWMGYELHPDKWTVQ; note = HLAs: DPA10103-DPB10101 DPA10103-DPB10201 DPA10103-DPB10202 DPA10103-DPB10401 DPA10103-DPB10402 DPA10103-DPB10501 DPA10103-DPB110501 DPA10103-DPB112601 DPA10103-DPB11501 DPA10103-DPB11601 DPA10103-DPB11801 DPA10103-DPB11901 DPA10103-DPB12301 DPA10103-DPB13101 DPA10103-DPB13401 DPA10103-DPB13901 DPA10103-DPB14001 DPA10103-DPB14101 DPA10103-DPB14801 DPA10103-DPB14901 DPA10103-DPB15001 DPA10103-DPB15101 DPA10103-DPB15501 DPA10103-DPB15901 DPA10103-DPB18001 DPA10104-DPB10101 DPA10104-DPB11501 DPA10105-DPB10101 DPA10105-DPB10401 DPA10105-DPB11801 DPA10105-DPB15001 DPA10106-DPB10101 DPA10201-DPB10101 DPA10201-DPB10201 DPA10201-DPB10202 DPA10201-DPB10401 DPA10201-DPB10501 DPA10201-DPB110601 DPA10201-DPB11501 DPA10201-DPB11601 DPA10201-DPB11901 DPA10201-DPB13401 DPA10201-DPB15501 DPA10202-DPB10101 DPA10202-DPB10201 DPA10202-DPB10202 DPA10202-DPB10401 DPA10202-DPB10501 DPA10202-DPB110601 DPA10202-DPB11301 DPA10202-DPB11801 DPA10202-DPB11901 DPA10202-DPB13101 DPA10202-DPB13801 DPA10202-DPB15501; note = HLAs: DPA10202-DPB16501 DPA10301-DPB10101 DPA10301-DPB10201 DPA10301-DPB10202 DPA10301-DPB10401 DPA10301-DPB10402 DPA10301-DPB110501 DPA10301-DPB110601 DPA10301-DPB11101 DPA10301-DPB11301 DPA10301-DPB11801 DPA10301-DPB12301 DPA10301-DPB13901 DPA10301-DPB14001 DPA10301-DPB14901 DPA10301-DPB16501 DPA10301-DPB17501 DPA10301-DPB18001 DPA10401-DPB10101 DPA10401-DPB10201 DPA10401-DPB10202 DPA10401-DPB10402 DPA10401-DPB10501 DPA10401-DPB110501 DPA10401-DPB14901
KEPPLLWEGYELLPDKWTVQ

SEQ ID NO: 7239 - protein, 14 aa, synthetic construct
  source 1..14: note = Seed: PPFLWMGYELHPDK; note = HLAs: DRB1_1001 DPA10103-DPB10201 DPA10103-DPB10202 DPA10103-DPB11501 DPA10103-DPB11601 DPA10103-DPB11901 DPA10103-DPB13401 DPA10103-DPB14001 DPA10103-DPB14101 DPA10103-DPB14801 DPA10103-DPB15001 DPA10103-DPB15901 DPA10104-DPB11501 DPA10105-DPB15001 DPA10201-DPB110601 DPA10201-DPB11501 DPA10201-DPB11601 DPA10201-DPB11901 DPA10202-DPB10101 DPA10202-DPB10201 DPA10202-DPB10202 DPA10202-DPB110601 DPA10202-DPB11901 DPA10202-DPB13101 DPA10202-DPB16501 DPA10301-DPB10201 DPA10301-DPB10202 DPA10301-DPB10401 DPA10301-DPB10402 DPA10301-DPB110501 DPA10301-DPB110601 DPA10301-DPB11801 DPA10301-DPB12301 DPA10301-DPB13901 DPA10301-DPB14001 DPA10301-DPB14901 DPA10301-DPB15501 DPA10301-DPB17501 DPA10301-DPB18001 DPA10401-DPB10201 DPA10401-DPB10202 DPA10401-DPB10402 DPA10401-DPB10501 DPA10401-DPB110501 DPA10401-DPB14901
PPFLWAGVELLPDK

SEQ ID NO: 7240 - protein, 14 aa, synthetic construct
  source 1..14: note = Seed: PPFLWMGYELHPDK; note = HLAs: DRB1_1001 DPA10103-DPB10101 DPA10103-DPB10201 DPA10103-DPB10202 DPA10103-DPB10401 DPA10103-DPB112601 DPA10103-DPB11501 DPA10103-DPB11601 DPA10103-DPB11901 DPA10103-DPB12301 DPA10103-DPB13101 DPA10103-DPB13401 DPA10103-DPB13901 DPA10103-DPB14001 DPA10103-DPB14101 DPA10103-DPB14801 DPA10103-DPB15001 DPA10103-DPB15901 DPA10104-DPB10101 DPA10104-DPB11501 DPA10105-DPB10101 DPA10105-DPB10401 DPA10105-DPB15001 DPA10106-DPB10101 DPA10201-DPB10101 DPA10201-DPB110601 DPA10201-DPB11501 DPA10201-DPB11601 DPA10201-DPB11901 DPA10202-DPB10101 DPA10202-DPB10201 DPA10202-DPB10202 DPA10202-DPB10401 DPA10202-DPB110601 DPA10202-DPB11901 DPA10202-DPB13101 DPA10202-DPB16501 DPA10301-DPB10101 DPA10301-DPB10201 DPA10301-DPB10202 DPA10301-DPB10401 DPA10301-DPB10402 DPA10301-DPB110501 DPA10301-DPB110601 DPA10301-DPB11801 DPA10301-DPB12301 DPA10301-DPB13901 DPA10301-DPB14001 DPA10301-DPB14901 DPA10301-DPB15501 DPA10301-DPB16501 DPA10301-DPB17501 DPA10301-DPB18001 DPA10401-DPB10101 DPA10401-DPB10201; note = HLAs: DPA10401-DPB10202 DPA10401-DPB10402 DPA10401-DPB10501 DPA10401-DPB110501 DPA10401-DPB14901
PPFLWIGAELIPDK

SEQ ID NO: 7241 - protein, 20 aa, synthetic construct
  source 1..20: note = Seed: KEPPFLWMGYELHPDKWTVQ; note = HLAs: DRB1_0101 DRB1_0405 DRB1_1001 DPA10103-DPB10101 DPA10103-DPB10201 DPA10103-DPB10202 DPA10103-DPB10401 DPA10103-DPB10402 DPA10103-DPB10501 DPA10103-DPB110501 DPA10103-DPB112601 DPA10103-DPB11501 DPA10103-DPB11601 DPA10103-DPB11801 DPA10103-DPB11901 DPA10103-DPB12301 DPA10103-DPB13101 DPA10103-DPB13401 DPA10103-DPB13901 DPA10103-DPB14001 DPA10103-DPB14101 DPA10103-DPB14801 DPA10103-DPB14901 DPA10103-DPB15001 DPA10103-DPB15101 DPA10103-DPB15501 DPA10103-DPB15901 DPA10103-DPB18001 DPA10104-DPB10101 DPA10104-DPB11501 DPA10105-DPB10101 DPA10105-DPB10401 DPA10105-DPB11801 DPA10105-DPB15001 DPA10106-DPB10101 DPA10201-DPB10101 DPA10201-DPB10201 DPA10201-DPB10202 DPA10201-DPB10401 DPA10201-DPB10501 DPA10201-DPB110601 DPA10201-DPB11501 DPA10201-DPB11601 DPA10201-DPB11901 DPA10201-DPB13401 DPA10201-DPB15501 DPA10202-DPB10101 DPA10202-DPB10201 DPA10202-DPB10202 DPA10202-DPB10401 DPA10202-DPB10501 DPA10202-DPB110601 DPA10202-DPB11301 DPA10202-DPB11801 DPA10202-DPB11901 DPA10202-DPB13101; note = HLAs: DPA10202-DPB13801 DPA10202-DPB15501 DPA10202-DPB16501 DPA10301-DPB10101 DPA10301-DPB10201 DPA10301-DPB10202 DPA10301-DPB10401 DPA10301-DPB10402 DPA10301-DPB110501 DPA10301-DPB110601 DPA10301-DPB11101 DPA10301-DPB11301 DPA10301-DPB11801 DPA10301-DPB12301 DPA10301-DPB13901 DPA10301-DPB14001 DPA10301-DPB14901 DPA10301-DPB15501 DPA10301-DPB16501 DPA10301-DPB17501 DPA10301-DPB18001 DPA10401-DPB10101 DPA10401-DPB10201 DPA10401-DPB10202 DPA10401-DPB10402 DPA10401-DPB10501 DPA10401-DPB110501 DPA10401-DPB14901
KEPPFLWEGIELFPDKWTVQ

SEQ ID NO: 7242 - protein, 20 aa, synthetic construct
  source 1..20: note = Seed: KEPPFLWMGYELHPDKWTVQ; note = HLAs: DRB1_0101 DRB1_0405 DRB1_1001 DPA10103-DPB10101 DPA10103-DPB10201 DPA10103-DPB10202 DPA10103-DPB10401 DPA10103-DPB10402 DPA10103-DPB10501 DPA10103-DPB110501 DPA10103-DPB112601 DPA10103-DPB11501 DPA10103-DPB11601 DPA10103-DPB11801 DPA10103-DPB11901 DPA10103-DPB12301 DPA10103-DPB13101 DPA10103-DPB13401 DPA10103-DPB13901 DPA10103-DPB14001 DPA10103-DPB14101 DPA10103-DPB14801 DPA10103-DPB14901 DPA10103-DPB15001 DPA10103-DPB15101 DPA10103-DPB15501 DPA10103-DPB15901 DPA10103-DPB18001 DPA10104-DPB10101 DPA10104-DPB11501 DPA10105-DPB10101 DPA10105-DPB10401 DPA10105-DPB11801 DPA10105-DPB15001 DPA10106-DPB10101 DPA10201-DPB10101 DPA10201-DPB10201 DPA10201-DPB10202 DPA10201-DPB10401 DPA10201-DPB10501 DPA10201-DPB110601 DPA10201-DPB11501 DPA10201-DPB11601 DPA10201-DPB11901 DPA10201-DPB13401 DPA10201-DPB15501 DPA10202-DPB10101 DPA10202-DPB10201 DPA10202-DPB10202 DPA10202-DPB10401 DPA10202-DPB10501 DPA10202-DPB110601 DPA10202-DPB11101 DPA10202-DPB11301 DPA10202-DPB11801 DPA10202-DPB11901; note = HLAs: DPA10202-DPB13101 DPA10202-DPB13801 DPA10202-DPB15501 DPA10202-DPB16501 DPA10301-DPB10101 DPA10301-DPB10201 DPA10301-DPB10202 DPA10301-DPB10401 DPA10301-DPB10402 DPA10301-DPB110501 DPA10301-DPB110601 DPA10301-DPB11101 DPA10301-DPB11301 DPA10301-DPB11801 DPA10301-DPB12301 DPA10301-DPB13901 DPA10301-DPB14001 DPA10301-DPB14901 DPA10301-DPB15501 DPA10301-DPB16501 DPA10301-DPB17501 DPA10301-DPB18001 DPA10401-DPB10101 DPA10401-DPB10201 DPA10401-DPB10202 DPA10401-DPB10402 DPA10401-DPB10501 DPA10401-DPB110501 DPA10401-DPB14901
KEPPYLWTGIELVPDKWTVQ

SEQ ID NO: 7243 - protein, 20 aa, synthetic construct
  source 1..20: note = Seed: KEPPFLWMGYELHPDKWTVQ; note = HLAs: DRB1_0101 DPA10103-DPB10101 DPA10103-DPB10201 DPA10103-DPB10202 DPA10103-DPB10401 DPA10103-DPB10402 DPA10103-DPB10501 DPA10103-DPB110501 DPA10103-DPB112601 DPA10103-DPB11501 DPA10103-DPB11601 DPA10103-DPB11801 DPA10103-DPB11901 DPA10103-DPB12301 DPA10103-DPB13101 DPA10103-DPB13401 DPA10103-DPB13901 DPA10103-DPB14001 DPA10103-DPB14101 DPA10103-DPB14801 DPA10103-DPB14901 DPA10103-DPB15001 DPA10103-DPB15101 DPA10103-DPB15501 DPA10103-DPB15901 DPA10103-DPB18001 DPA10104-DPB10101 DPA10104-DPB11501 DPA10105-DPB10101 DPA10105-DPB10401 DPA10105-DPB11801 DPA10105-DPB15001 DPA10106-DPB10101 DPA10201-DPB10101 DPA10201-DPB10201 DPA10201-DPB10202 DPA10201-DPB10401 DPA10201-DPB10501 DPA10201-DPB110601 DPA10201-DPB11501 DPA10201-DPB11601 DPA10201-DPB11901 DPA10201-DPB13401 DPA10201-DPB15501 DPA10202-DPB10101 DPA10202-DPB10201 DPA10202-DPB10202 DPA10202-DPB10401 DPA10202-DPB10501 DPA10202-DPB110601 DPA10202-DPB11101 DPA10202-DPB11301 DPA10202-DPB11801 DPA10202-DPB11901 DPA10202-DPB13101; note = HLAs: DPA10202-DPB13801 DPA10202-DPB15501 DPA10202-DPB16501 DPA10301-DPB10101 DPA10301-DPB10201 DPA10301-DPB10202 DPA10301-DPB10401 DPA10301-DPB10402 DPA10301-DPB110501 DPA10301-DPB110601 DPA10301-DPB11101 DPA10301-DPB11301 DPA10301-DPB11801 DPA10301-DPB12301 DPA10301-DPB13901 DPA10301-DPB14001 DPA10301-DPB14901 DPA10301-DPB15501 DPA10301-DPB16501 DPA10301-DPB17501 DPA10301-DPB18001 DPA10401-DPB10101 DPA10401-DPB10201 DPA10401-DPB10202 DPA10401-DPB10402 DPA10401-DPB10501 DPA10401-DPB110501 DPA10401-DPB14901
KEPPYLWHGWELLPDKWTVQ

SEQ ID NO: 7244 - protein, 20 aa, synthetic construct
  source 1..20: note = Seed: KEPPFLWMGYELHPDKWTVQ; note = HLAs: DPA10103-DPB10101 DPA10103-DPB10201 DPA10103-DPB10202 DPA10103-DPB10401 DPA10103-DPB10402 DPA10103-DPB10501 DPA10103-DPB110501 DPA10103-DPB112601 DPA10103-DPB11501 DPA10103-DPB11601 DPA10103-DPB11801 DPA10103-DPB11901 DPA10103-DPB12301 DPA10103-DPB13101 DPA10103-DPB13401 DPA10103-DPB13901 DPA10103-DPB14001 DPA10103-DPB14101 DPA10103-DPB14801 DPA10103-DPB14901 DPA10103-DPB15001 DPA10103-DPB15101 DPA10103-DPB15501 DPA10103-DPB15901 DPA10103-DPB18001 DPA10104-DPB10101 DPA10104-DPB11501 DPA10105-DPB10101 DPA10105-DPB10401 DPA10105-DPB11801 DPA10105-DPB15001 DPA10106-DPB10101 DPA10201-DPB10101 DPA10201-DPB10201 DPA10201-DPB10202 DPA10201-DPB10401 DPA10201-DPB10501 DPA10201-DPB110601 DPA10201-DPB11501 DPA10201-DPB11601 DPA10201-DPB11901 DPA10201-DPB13401 DPA10201-DPB15501 DPA10202-DPB10101 DPA10202-DPB10201 DPA10202-DPB10202 DPA10202-DPB10401 DPA10202-DPB10501 DPA10202-DPB110601 DPA10202-DPB11101 DPA10202-DPB11301 DPA10202-DPB11801 DPA10202-DPB11901 DPA10202-DPB13101 DPA10202-DPB13801; note = HLAs: DPA10202-DPB15501 DPA10202-DPB16501 DPA10301-DPB10101 DPA10301-DPB10201 DPA10301-DPB10202 DPA10301-DPB10401 DPA10301-DPB10402 DPA10301-DPB110501 DPA10301-DPB110601 DPA10301-DPB11101 DPA10301-DPB11301 DPA10301-DPB11801 DPA10301-DPB12301 DPA10301-DPB13901 DPA10301-DPB14001 DPA10301-DPB14901 DPA10301-DPB15501 DPA10301-DPB16501 DPA10301-DPB17501 DPA10301-DPB18001 DPA10401-DPB10101 DPA10401-DPB10201 DPA10401-DPB10202 DPA10401-DPB10402 DPA10401-DPB10501 DPA10401-DPB110501 DPA10401-DPB14901
KEPPILWDGFELLPDKWTVQ

SEQ ID NO: 7245 - protein, 20 aa, synthetic construct
  source 1..20: note = Seed: KEPPFLWMGYELHPDKWTVQ; note = HLAs: DRB1_0101 DRB1_0405 DRB1_1001 DPA10103-DPB10201 DPA10103-DPB10202 DPA10103-DPB10401 DPA10103-DPB10402 DPA10103-DPB10501 DPA10103-DPB110501 DPA10103-DPB112601 DPA10103-DPB11501 DPA10103-DPB11601 DPA10103-DPB11801 DPA10103-DPB11901 DPA10103-DPB12301 DPA10103-DPB13101 DPA10103-DPB13401 DPA10103-DPB13901 DPA10103-DPB14001 DPA10103-DPB14101 DPA10103-DPB14801 DPA10103-DPB14901 DPA10103-DPB15101 DPA10103-DPB15501 DPA10103-DPB15901 DPA10103-DPB18001 DPA10104-DPB11501 DPA10105-DPB10401 DPA10105-DPB11801 DPA10106-DPB10101 DPA10201-DPB10101 DPA10201-DPB10201 DPA10201-DPB10202 DPA10201-DPB10401 DPA10201-DPB10501 DPA10201-DPB110601 DPA10201-DPB11501 DPA10201-DPB11601 DPA10201-DPB11901 DPA10201-DPB13401 DPA10201-DPB15501 DPA10202-DPB10101 DPA10202-DPB10201 DPA10202-DPB10202 DPA10202-DPB10401 DPA10202-DPB10501 DPA10202-DPB110601 DPA10202-DPB11101 DPA10202-DPB11301 DPA10202-DPB11801 DPA10202-DPB11901 DPA10202-DPB13101 DPA10202-DPB13801 DPA10202-DPB15501 DPA10202-DPB16501 DPA10301-DPB10101; note = HLAs: DPA10301-DPB10201 DPA10301-DPB10202 DPA10301-DPB10401 DPA10301-DPB10402 DPA10301-DPB110501 DPA10301-DPB110601 DPA10301-DPB11101 DPA10301-DPB11301 DPA10301-DPB11801 DPA10301-DPB12301 DPA10301-DPB13901 DPA10301-DPB14001 DPA10301-DPB14901 DPA10301-DPB15501 DPA10301-DPB16501 DPA10301-DPB17501 DPA10301-DPB18001 DPA10401-DPB10201 DPA10401-DPB10202 DPA10401-DPB10402 DPA10401-DPB10501 DPA10401-DPB110501 DPA10401-DPB14901
KEPPFLWWGIELIPDKWTVQ

SEQ ID NO: 7246 - protein, 20 aa, synthetic construct
  source 1..20: note = Seed: KEPPFLWMGYELHPDKWTVQ; note = HLAs: DPA10103-DPB10101 DPA10103-DPB10201 DPA10103-DPB10202 DPA10103-DPB10401 DPA10103-DPB10402 DPA10103-DPB10501 DPA10103-DPB110501 DPA10103-DPB112601 DPA10103-DPB11501 DPA10103-DPB11601 DPA10103-DPB11801 DPA10103-DPB11901 DPA10103-DPB12301 DPA10103-DPB13101 DPA10103-DPB13401 DPA10103-DPB13901 DPA10103-DPB14001 DPA10103-DPB14101 DPA10103-DPB14801 DPA10103-DPB14901 DPA10103-DPB15001 DPA10103-DPB15101 DPA10103-DPB15501 DPA10103-DPB15901 DPA10103-DPB18001 DPA10104-DPB10101 DPA10104-DPB11501 DPA10105-DPB10101 DPA10105-DPB10401 DPA10105-DPB11801 DPA10105-DPB15001 DPA10106-DPB10101 DPA10201-DPB10101 DPA10201-DPB10201 DPA10201-DPB10202 DPA10201-DPB10401 DPA10201-DPB10501 DPA10201-DPB110601 DPA10201-DPB11501 DPA10201-DPB11601 DPA10201-DPB11901 DPA10201-DPB13401 DPA10201-DPB15501 DPA10202-DPB10101 DPA10202-DPB10201 DPA10202-DPB10202 DPA10202-DPB10401 DPA10202-DPB10501 DPA10202-DPB110601 DPA10202-DPB11301 DPA10202-DPB11801 DPA10202-DPB11901 DPA10202-DPB13101 DPA10202-DPB13801 DPA10202-DPB15501; note = HLAs: DPA10202-DPB16501 DPA10301-DPB10101 DPA10301-DPB10201 DPA10301-DPB10202 DPA10301-DPB10401 DPA10301-DPB10402 DPA10301-DPB110501 DPA10301-DPB110601 DPA10301-DPB11101 DPA10301-DPB11301 DPA10301-DPB11801 DPA10301-DPB12301 DPA10301-DPB13901 DPA10301-DPB14001 DPA10301-DPB14901 DPA10301-DPB15501 DPA10301-DPB16501 DPA10301-DPB17501 DPA10301-DPB18001 DPA10401-DPB10101 DPA10401-DPB10201 DPA10401-DPB10202 DPA10401-DPB10402 DPA10401-DPB10501 DPA10401-DPB110501 DPA10401-DPB14901
KEPPFLWTGMELYPDKWTVQ

SEQ ID NO: 7247 - protein, 20 aa, synthetic construct
  source 1..20: note = Seed: KEPPFLWMGYELHPDKWTVQ; note = HLAs: DRB1_0101 DRB1_0405 DRB1_1001 DPA10103-DPB10101 DPA10103-DPB10201 DPA10103-DPB10202 DPA10103-DPB10401 DPA10103-DPB10402 DPA10103-DPB10501 DPA10103-DPB110501 DPA10103-DPB112601 DPA10103-DPB11501 DPA10103-DPB11601 DPA10103-DPB11801 DPA10103-DPB11901 DPA10103-DPB12301 DPA10103-DPB13101 DPA10103-DPB13401 DPA10103-DPB13901 DPA10103-DPB14001 DPA10103-DPB14801 DPA10103-DPB14901 DPA10103-DPB15001 DPA10103-DPB15101 DPA10103-DPB15501 DPA10103-DPB15901 DPA10103-DPB18001 DPA10104-DPB10101 DPA10104-DPB11501 DPA10105-DPB10101 DPA10105-DPB10401 DPA10105-DPB11801 DPA10105-DPB15001 DPA10106-DPB10101 DPA10201-DPB10101 DPA10201-DPB10201 DPA10201-DPB10202 DPA10201-DPB10401 DPA10201-DPB10501 DPA10201-DPB110601 DPA10201-DPB11501 DPA10201-DPB11601 DPA10201-DPB11901 DPA10201-DPB13401 DPA10202-DPB10101 DPA10202-DPB10401 DPA10202-DPB10501 DPA10202-DPB110601 DPA10202-DPB11801 DPA10202-DPB11901 DPA10202-DPB13101 DPA10202-DPB13801 DPA10202-DPB15501 DPA10202-DPB16501 DPA10301-DPB10101 DPA10301-DPB10201; note = HLAs: DPA10301-DPB10202 DPA10301-DPB10401 DPA10301-DPB10402 DPA10301-DPB110501 DPA10301-DPB110601 DPA10301-DPB11301 DPA10301-DPB11801 DPA10301-DPB12301 DPA10301-DPB13901 DPA10301-DPB14001 DPA10301-DPB14901 DPA10301-DPB16501 DPA10301-DPB17501 DPA10301-DPB18001 DPA10401-DPB10101 DPA10401-DPB10201 DPA10401-DPB10202 DPA10401-DPB10402 DPA10401-DPB10501 DPA10401-DPB110501 DPA10401-DPB14901
KEPPFLWQGIELFPDKWTVQ

SEQ ID NO: 7248 - protein, 20 aa, synthetic construct
  source 1..20: note = Seed: KEPPFLWMGYELHPDKWTVQ; note = HLAs: DPA10103-DPB10101 DPA10103-DPB10201 DPA10103-DPB10202 DPA10103-DPB10401 DPA10103-DPB10402 DPA10103-DPB10501 DPA10103-DPB110501 DPA10103-DPB112601 DPA10103-DPB11501 DPA10103-DPB11601 DPA10103-DPB11801 DPA10103-DPB11901 DPA10103-DPB12301 DPA10103-DPB13101 DPA10103-DPB13401 DPA10103-DPB13901 DPA10103-DPB14001 DPA10103-DPB14101 DPA10103-DPB14801 DPA10103-DPB14901 DPA10103-DPB15001 DPA10103-DPB15101 DPA10103-DPB15501 DPA10103-DPB15901 DPA10103-DPB18001 DPA10104-DPB10101 DPA10104-DPB11501 DPA10105-DPB10101 DPA10105-DPB10401 DPA10105-DPB11801 DPA10105-DPB15001 DPA10106-DPB10101 DPA10201-DPB10101 DPA10201-DPB10201 DPA10201-DPB10202 DPA10201-DPB10401 DPA10201-DPB10501 DPA10201-DPB110601 DPA10201-DPB11501 DPA10201-DPB11601 DPA10201-DPB11901 DPA10201-DPB13401 DPA10201-DPB15501 DPA10202-DPB10101 DPA10202-DPB10201 DPA10202-DPB10202 DPA10202-DPB10401 DPA10202-DPB10501 DPA10202-DPB110601 DPA10202-DPB11101 DPA10202-DPB11301 DPA10202-DPB11801 DPA10202-DPB11901 DPA10202-DPB13101 DPA10202-DPB13801; note = HLAs: DPA10202-DPB15501 DPA10202-DPB16501 DPA10301-DPB10101 DPA10301-DPB10201 DPA10301-DPB10202 DPA10301-DPB10401 DPA10301-DPB10402 DPA10301-DPB110501 DPA10301-DPB110601 DPA10301-DPB11101 DPA10301-DPB11301 DPA10301-DPB11801 DPA10301-DPB12301 DPA10301-DPB13901 DPA10301-DPB14001 DPA10301-DPB14901 DPA10301-DPB15501 DPA10301-DPB16501 DPA10301-DPB17501 DPA10301-DPB18001 DPA10401-DPB10101 DPA10401-DPB10201 DPA10401-DPB10202 DPA10401-DPB10402 DPA10401-DPB10501 DPA10401-DPB110501 DPA10401-DPB14901
KEPPMLWTGFELNPDKWTVQ

SEQ ID NO: 7249 - protein, 20 aa, synthetic construct
  source 1..20: note = Seed: KEPPFLWMGYELHPDKWTVQ; note = HLAs: DPA10103-DPB10101 DPA10103-DPB10201 DPA10103-DPB10202 DPA10103-DPB10401 DPA10103-DPB10402 DPA10103-DPB10501 DPA10103-DPB110501 DPA10103-DPB112601 DPA10103-DPB11501 DPA10103-DPB11601 DPA10103-DPB11801 DPA10103-DPB11901 DPA10103-DPB12301 DPA10103-DPB13101 DPA10103-DPB13401 DPA10103-DPB13901 DPA10103-DPB14001 DPA10103-DPB14101 DPA10103-DPB14801 DPA10103-DPB14901 DPA10103-DPB15001 DPA10103-DPB15101 DPA10103-DPB15501 DPA10103-DPB15901 DPA10103-DPB18001 DPA10104-DPB10101 DPA10104-DPB11501 DPA10105-DPB10101 DPA10105-DPB10401 DPA10105-DPB11801 DPA10105-DPB15001 DPA10106-DPB10101 DPA10201-DPB10101 DPA10201-DPB10201 DPA10201-DPB10202 DPA10201-DPB10401 DPA10201-DPB10501 DPA10201-DPB110601 DPA10201-DPB11501 DPA10201-DPB11601 DPA10201-DPB11901 DPA10201-DPB13401 DPA10201-DPB15501 DPA10202-DPB10101 DPA10202-DPB10201 DPA10202-DPB10202 DPA10202-DPB10401 DPA10202-DPB10501 DPA10202-DPB110601 DPA10202-DPB11101 DPA10202-DPB11301 DPA10202-DPB11801 DPA10202-DPB11901 DPA10202-DPB13101 DPA10202-DPB13801; note = HLAs: DPA10202-DPB15501 DPA10202-DPB16501 DPA10301-DPB10101 DPA10301-DPB10201 DPA10301-DPB10202 DPA10301-DPB10401 DPA10301-DPB10402 DPA10301-DPB110501 DPA10301-DPB110601 DPA10301-DPB11101 DPA10301-DPB11301 DPA10301-DPB12301 DPA10301-DPB13901 DPA10301-DPB14001 DPA10301-DPB14901 DPA10301-DPB15501 DPA10301-DPB16501 DPA10301-DPB17501 DPA10301-DPB18001 DPA10401-DPB10101 DPA10401-DPB10201 DPA10401-DPB10202 DPA10401-DPB10402 DPA10401-DPB10501 DPA10401-DPB110501 DPA10401-DPB14901
KEPPRLWSGFELIPDKWTVQ

SEQ ID NO: 7250 - protein, 20 aa, synthetic construct
  source 1..20: note = Seed: KEPPFLWMGYELHPDKWTVQ; note = HLAs: DPA10103-DPB10101 DPA10103-DPB10201 DPA10103-DPB10202 DPA10103-DPB10401 DPA10103-DPB10402 DPA10103-DPB10501 DPA10103-DPB110501 DPA10103-DPB112601 DPA10103-DPB11501 DPA10103-DPB11601 DPA10103-DPB11801 DPA10103-DPB11901 DPA10103-DPB12301 DPA10103-DPB13101 DPA10103-DPB13401 DPA10103-DPB13901 DPA10103-DPB14001 DPA10103-DPB14101 DPA10103-DPB14801 DPA10103-DPB14901 DPA10103-DPB15001 DPA10103-DPB15101 DPA10103-DPB15501 DPA10103-DPB15901 DPA10103-DPB18001 DPA10104-DPB10101 DPA10104-DPB11501 DPA10105-DPB10101 DPA10105-DPB10401 DPA10105-DPB11801 DPA10105-DPB15001 DPA10106-DPB10101 DPA10201-DPB10101 DPA10201-DPB10201 DPA10201-DPB10202 DPA10201-DPB10401 DPA10201-DPB10501 DPA10201-DPB110601 DPA10201-DPB11501 DPA10201-DPB11601 DPA10201-DPB11901 DPA10201-DPB13401 DPA10201-DPB15501 DPA10202-DPB10101 DPA10202-DPB10201 DPA10202-DPB10202 DPA10202-DPB10401 DPA10202-DPB10501 DPA10202-DPB110601 DPA10202-DPB11301 DPA10202-DPB11801 DPA10202-DPB11901 DPA10202-DPB13101 DPA10202-DPB13801 DPA10202-DPB15501; note = HLAs: DPA10202-DPB16501 DPA10301-DPB10101 DPA10301-DPB10201 DPA10301-DPB10202 DPA10301-DPB10401 DPA10301-DPB10402 DPA10301-DPB110501 DPA10301-DPB110601 DPA10301-DPB11301 DPA10301-DPB11801 DPA10301-DPB12301 DPA10301-DPB13901 DPA10301-DPB14001 DPA10301-DPB14901 DPA10301-DPB16501 DPA10301-DPB17501 DPA10301-DPB18001 DPA10401-DPB10101 DPA10401-DPB10201 DPA10401-DPB10202 DPA10401-DPB10402 DPA10401-DPB10501 DPA10401-DPB110501 DPA10401-DPB14901
KEPPMLWHGFELAPDKWTVQ

SEQ ID NO: 7251 - protein, 20 aa, synthetic construct
  source 1..20: note = Seed: KEPPFLWMGYELHPDKWTVQ; note = HLAs: DPA10103-DPB10101 DPA10103-DPB10201 DPA10103-DPB10202 DPA10103-DPB10401 DPA10103-DPB10402 DPA10103-DPB10501 DPA10103-DPB110501 DPA10103-DPB112601 DPA10103-DPB11501 DPA10103-DPB11601 DPA10103-DPB11801 DPA10103-DPB11901 DPA10103-DPB12301 DPA10103-DPB13101 DPA10103-DPB13401 DPA10103-DPB13901 DPA10103-DPB14001 DPA10103-DPB14101 DPA10103-DPB14801 DPA10103-DPB14901 DPA10103-DPB15001 DPA10103-DPB15101 DPA10103-DPB15501 DPA10103-DPB15901 DPA10103-DPB18001 DPA10104-DPB10101 DPA10104-DPB11501 DPA10105-DPB10101 DPA10105-DPB10401 DPA10105-DPB11801 DPA10105-DPB15001 DPA10106-DPB10101 DPA10201-DPB10101 DPA10201-DPB10201 DPA10201-DPB10202 DPA10201-DPB10401 DPA10201-DPB10501 DPA10201-DPB110601 DPA10201-DPB11501 DPA10201-DPB11601 DPA10201-DPB11901 DPA10201-DPB13401 DPA10201-DPB15501 DPA10202-DPB10101 DPA10202-DPB10201 DPA10202-DPB10202 DPA10202-DPB10401 DPA10202-DPB10501 DPA10202-DPB110601 DPA10202-DPB11101 DPA10202-DPB11301 DPA10202-DPB11801 DPA10202-DPB11901 DPA10202-DPB13101 DPA10202-DPB13801; note = HLAs: DPA10202-DPB15501 DPA10202-DPB16501 DPA10301-DPB10101 DPA10301-DPB10201 DPA10301-DPB10202 DPA10301-DPB10401 DPA10301-DPB10402 DPA10301-DPB110501 DPA10301-DPB110601 DPA10301-DPB11101 DPA10301-DPB11301 DPA10301-DPB11801 DPA10301-DPB12301 DPA10301-DPB13901 DPA10301-DPB14001 DPA10301-DPB14901 DPA10301-DPB16501 DPA10301-DPB17501 DPA10301-DPB18001 DPA10401-DPB10101 DPA10401-DPB10201 DPA10401-DPB10202 DPA10401-DPB10402 DPA10401-DPB10501 DPA10401-DPB110501 DPA10401-DPB14901
KEPPFLWYGYELFPDKWTVQ

SEQ ID NO: 7252 - protein, 20 aa, synthetic construct
  source 1..20: note = Seed: KEPPFLWMGYELHPDKWTVQ; note = HLAs: DRB1_0101 DRB1_1001 DPA10103-DPB10101 DPA10103-DPB10201 DPA10103-DPB10202 DPA10103-DPB10401 DPA10103-DPB10402 DPA10103-DPB10501 DPA10103-DPB110501 DPA10103-DPB112601 DPA10103-DPB11501 DPA10103-DPB11601 DPA10103-DPB11801 DPA10103-DPB11901 DPA10103-DPB12301 DPA10103-DPB13101 DPA10103-DPB13401 DPA10103-DPB13901 DPA10103-DPB14001 DPA10103-DPB14101 DPA10103-DPB14801 DPA10103-DPB14901 DPA10103-DPB15001 DPA10103-DPB15101 DPA10103-DPB15501 DPA10103-DPB15901 DPA10103-DPB18001 DPA10104-DPB10101 DPA10104-DPB11501 DPA10105-DPB10101 DPA10105-DPB10401 DPA10105-DPB11801 DPA10105-DPB15001 DPA10106-DPB10101 DPA10201-DPB10101 DPA10201-DPB10201 DPA10201-DPB10202 DPA10201-DPB10401 DPA10201-DPB10501 DPA10201-DPB110601 DPA10201-DPB11501 DPA10201-DPB11601 DPA10201-DPB11901 DPA10201-DPB13401 DPA10201-DPB15501 DPA10202-DPB10101 DPA10202-DPB10201 DPA10202-DPB10202 DPA10202-DPB10401 DPA10202-DPB10501 DPA10202-DPB110601 DPA10202-DPB11101 DPA10202-DPB11301 DPA10202-DPB11801 DPA10202-DPB11901; note = HLAs: DPA10202-DPB13101 DPA10202-DPB13801 DPA10202-DPB15501 DPA10202-DPB16501 DPA10301-DPB10101 DPA10301-DPB10201 DPA10301-DPB10202 DPA10301-DPB10401 DPA10301-DPB10402 DPA10301-DPB110501 DPA10301-DPB110601 DPA10301-DPB11101 DPA10301-DPB11301 DPA10301-DPB11801 DPA10301-DPB12301 DPA10301-DPB13901 DPA10301-DPB14001 DPA10301-DPB14901 DPA10301-DPB15501 DPA10301-DPB16501 DPA10301-DPB17501 DPA10301-DPB18001 DPA10401-DPB10101 DPA10401-DPB10201 DPA10401-DPB10202 DPA10401-DPB10402 DPA10401-DPB10501 DPA10401-DPB110501 DPA10401-DPB14901
KEPPFLWLGYELTPDKWTVQ

SEQ ID NO: 7253 - protein, 20 aa, synthetic construct
  source 1..20: note = Seed: KEPPFLWMGYELHPDKWTVQ; note = HLAs: DRB1_0101 DRB1_1001 DPA10103-DPB10101 DPA10103-DPB10201 DPA10103-DPB10202 DPA10103-DPB10401 DPA10103-DPB10402 DPA10103-DPB10501 DPA10103-DPB110501 DPA10103-DPB112601 DPA10103-DPB11501 DPA10103-DPB11601 DPA10103-DPB11801 DPA10103-DPB11901 DPA10103-DPB12301 DPA10103-DPB13101 DPA10103-DPB13401 DPA10103-DPB13901 DPA10103-DPB14001 DPA10103-DPB14101 DPA10103-DPB14801 DPA10103-DPB14901 DPA10103-DPB15001 DPA10103-DPB15101 DPA10103-DPB15501 DPA10103-DPB15901 DPA10103-DPB18001 DPA10104-DPB10101 DPA10104-DPB11501 DPA10105-DPB10101 DPA10105-DPB10401 DPA10105-DPB11801 DPA10105-DPB15001 DPA10106-DPB10101 DPA10201-DPB10101 DPA10201-DPB10201 DPA10201-DPB10202 DPA10201-DPB10401 DPA10201-DPB10501 DPA10201-DPB110601 DPA10201-DPB11501 DPA10201-DPB11601 DPA10201-DPB11901 DPA10201-DPB13401 DPA10201-DPB15501 DPA10202-DPB10101 DPA10202-DPB10201 DPA10202-DPB10202 DPA10202-DPB10401 DPA10202-DPB10501 DPA10202-DPB110601 DPA10202-DPB11101 DPA10202-DPB11301 DPA10202-DPB11801 DPA10202-DPB11901; note = HLAs: DPA10202-DPB13101 DPA10202-DPB13801 DPA10202-DPB15501 DPA10202-DPB16501 DPA10301-DPB10101 DPA10301-DPB10201 DPA10301-DPB10202 DPA10301-DPB10401 DPA10301-DPB10402 DPA10301-DPB110501 DPA10301-DPB110601 DPA10301-DPB11101 DPA10301-DPB11301 DPA10301-DPB11801 DPA10301-DPB12301 DPA10301-DPB13901 DPA10301-DPB14001 DPA10301-DPB14901 DPA10301-DPB15501 DPA10301-DPB16501 DPA10301-DPB17501 DPA10301-DPB18001 DPA10401-DPB10101 DPA10401-DPB10201 DPA10401-DPB10202 DPA10401-DPB10402 DPA10401-DPB10501 DPA10401-DPB110501 DPA10401-DPB14901
KEPPFLWEGLELMPDKWTVQ

SEQ ID NO: 7254 - protein, 20 aa, synthetic construct
  source 1..20: note = Seed: KEPPFLWMGYELHPDKWTVQ; note = HLAs: DPA10103-DPB10101 DPA10103-DPB10201 DPA10103-DPB10202 DPA10103-DPB10401 DPA10103-DPB10402 DPA10103-DPB10501 DPA10103-DPB110501 DPA10103-DPB112601 DPA10103-DPB11501 DPA10103-DPB11601 DPA10103-DPB11801 DPA10103-DPB11901 DPA10103-DPB12301 DPA10103-DPB13101 DPA10103-DPB13401 DPA10103-DPB13901 DPA10103-DPB14001 DPA10103-DPB14101 DPA10103-DPB14801 DPA10103-DPB14901 DPA10103-DPB15001 DPA10103-DPB15101 DPA10103-DPB15501 DPA10103-DPB15901 DPA10103-DPB18001 DPA10104-DPB10101 DPA10104-DPB11501 DPA10105-DPB10101 DPA10105-DPB10401 DPA10105-DPB11801 DPA10105-DPB15001 DPA10106-DPB10101 DPA10201-DPB10101 DPA10201-DPB10201 DPA10201-DPB10202 DPA10201-DPB10401 DPA10201-DPB10501 DPA10201-DPB110601 DPA10201-DPB11501 DPA10201-DPB11601 DPA10201-DPB11901 DPA10201-DPB13401 DPA10201-DPB15501 DPA10202-DPB10101 DPA10202-DPB10201 DPA10202-DPB10202 DPA10202-DPB10401 DPA10202-DPB10501 DPA10202-DPB110601 DPA10202-DPB11301 DPA10202-DPB11801 DPA10202-DPB11901 DPA10202-DPB13101 DPA10202-DPB13801 DPA10202-DPB15501; note = HLAs: DPA10202-DPB16501 DPA10301-DPB10101 DPA10301-DPB10201 DPA10301-DPB10202 DPA10301-DPB10401 DPA10301-DPB10402 DPA10301-DPB110501 DPA10301-DPB110601 DPA10301-DPB11101 DPA10301-DPB11301 DPA10301-DPB11801 DPA10301-DPB12301 DPA10301-DPB13901 DPA10301-DPB14001 DPA10301-DPB14901 DPA10301-DPB15501 DPA10301-DPB16501 DPA10301-DPB17501 DPA10301-DPB18001 DPA10401-DPB10101 DPA10401-DPB10201 DPA10401-DPB10202 DPA10401-DPB10402 DPA10401-DPB10501 DPA10401-DPB110501 DPA10401-DPB14901
KEPPILWEGYELLPDKWTVQ

SEQ ID NO: 7255 - protein, 20 aa, synthetic construct
  source 1..20: note = Seed: KEPPFLWMGYELHPDKWTVQ; note = HLAs: DRB1_0101 DPA10103-DPB10101 DPA10103-DPB10201 DPA10103-DPB10202 DPA10103-DPB10401 DPA10103-DPB10402 DPA10103-DPB10501 DPA10103-DPB110501 DPA10103-DPB112601 DPA10103-DPB11501 DPA10103-DPB11601 DPA10103-DPB11801 DPA10103-DPB11901 DPA10103-DPB12301 DPA10103-DPB13101 DPA10103-DPB13401 DPA10103-DPB13901 DPA10103-DPB14001 DPA10103-DPB14101 DPA10103-DPB14801 DPA10103-DPB14901 DPA10103-DPB15001 DPA10103-DPB15101 DPA10103-DPB15501 DPA10103-DPB15901 DPA10103-DPB18001 DPA10104-DPB10101 DPA10104-DPB11501 DPA10105-DPB10101 DPA10105-DPB10401 DPA10105-DPB11801 DPA10105-DPB15001 DPA10106-DPB10101 DPA10201-DPB10101 DPA10201-DPB10201 DPA10201-DPB10202 DPA10201-DPB10401 DPA10201-DPB10501 DPA10201-DPB110601 DPA10201-DPB11501 DPA10201-DPB11601 DPA10201-DPB11901 DPA10201-DPB13401 DPA10201-DPB15501 DPA10202-DPB10101 DPA10202-DPB10201 DPA10202-DPB10202 DPA10202-DPB10401 DPA10202-DPB10501 DPA10202-DPB110601 DPA10202-DPB11101 DPA10202-DPB11301 DPA10202-DPB11801 DPA10202-DPB11901 DPA10202-DPB13101; note = HLAs: DPA10202-DPB13801 DPA10202-DPB15501 DPA10202-DPB16501 DPA10301-DPB10101 DPA10301-DPB10201 DPA10301-DPB10202 DPA10301-DPB10401 DPA10301-DPB10402 DPA10301-DPB110501 DPA10301-DPB110601 DPA10301-DPB11101 DPA10301-DPB11301 DPA10301-DPB11801 DPA10301-DPB12301 DPA10301-DPB13901 DPA10301-DPB14001 DPA10301-DPB14901 DPA10301-DPB15501 DPA10301-DPB16501 DPA10301-DPB17501 DPA10301-DPB18001 DPA10401-DPB10101 DPA10401-DPB10201 DPA10401-DPB10202 DPA10401-DPB10402 DPA10401-DPB10501 DPA10401-DPB110501 DPA10401-DPB14901
KEPPFLWFGLELVPDKWTVQ

SEQ ID NO: 7256 - protein, 20 aa, synthetic construct
  source 1..20: note = Seed: KEPPFLWMGYELHPDKWTVQ; note = HLAs: DPA10103-DPB10101 DPA10103-DPB10201 DPA10103-DPB10202 DPA10103-DPB10401 DPA10103-DPB10402 DPA10103-DPB10501 DPA10103-DPB110501 DPA10103-DPB112601 DPA10103-DPB11501 DPA10103-DPB11601 DPA10103-DPB11801 DPA10103-DPB11901 DPA10103-DPB12301 DPA10103-DPB13101 DPA10103-DPB13401 DPA10103-DPB13901 DPA10103-DPB14001 DPA10103-DPB14101 DPA10103-DPB14801 DPA10103-DPB14901 DPA10103-DPB15101 DPA10103-DPB18001 DPA10104-DPB10101 DPA10104-DPB11501 DPA10105-DPB10101 DPA10105-DPB10401 DPA10105-DPB11801 DPA10106-DPB10101 DPA10201-DPB10101 DPA10201-DPB10201 DPA10201-DPB10202 DPA10201-DPB10401 DPA10201-DPB10501 DPA10201-DPB110601 DPA10201-DPB11501 DPA10201-DPB11601 DPA10201-DPB11901 DPA10201-DPB13401 DPA10201-DPB15501 DPA10202-DPB10101 DPA10202-DPB10201 DPA10202-DPB10202 DPA10202-DPB10401 DPA10202-DPB10501 DPA10202-DPB110601 DPA10202-DPB11101 DPA10202-DPB11301 DPA10202-DPB11801 DPA10202-DPB11901 DPA10202-DPB13101 DPA10202-DPB13801 DPA10301-DPB10201 DPA10301-DPB10202 DPA10301-DPB10402; note = HLAs: DPA10301-DPB110501 DPA10301-DPB110601 DPA10301-DPB11301 DPA10301-DPB14901 DPA10301-DPB16501 DPA10301-DPB17501 DPA10301-DPB18001 DPA10401-DPB10101 DPA10401-DPB10201 DPA10401-DPB10202 DPA10401-DPB10402 DPA10401-DPB110501 DPA10401-DPB14901
KEPPCLWAGFELLPDKWTVQ

SEQ ID NO: 7257 - protein, 20 aa, synthetic construct
  source 1..20: note = Seed: KEPPFLWMGYELHPDKWTVQ; note = HLAs: DRB1_0101 DRB1_1001 DPA10103-DPB10101 DPA10103-DPB10201 DPA10103-DPB10202 DPA10103-DPB10401 DPA10103-DPB10402 DPA10103-DPB10501 DPA10103-DPB110501 DPA10103-DPB112601 DPA10103-DPB11501 DPA10103-DPB11601 DPA10103-DPB11801 DPA10103-DPB11901 DPA10103-DPB12301 DPA10103-DPB13101 DPA10103-DPB13401 DPA10103-DPB13901 DPA10103-DPB14001 DPA10103-DPB14101 DPA10103-DPB14801 DPA10103-DPB14901 DPA10103-DPB15001 DPA10103-DPB15101 DPA10103-DPB15501 DPA10103-DPB15901 DPA10103-DPB18001 DPA10104-DPB10101 DPA10104-DPB11501 DPA10105-DPB10101 DPA10105-DPB10401 DPA10105-DPB11801 DPA10105-DPB15001 DPA10106-DPB10101 DPA10201-DPB10101 DPA10201-DPB10201 DPA10201-DPB10202 DPA10201-DPB10401 DPA10201-DPB10501 DPA10201-DPB110601 DPA10201-DPB11501 DPA10201-DPB11601 DPA10201-DPB11901 DPA10201-DPB13401 DPA10201-DPB15501 DPA10202-DPB10101 DPA10202-DPB10201 DPA10202-DPB10202 DPA10202-DPB10401 DPA10202-DPB10501 DPA10202-DPB110601 DPA10202-DPB11101 DPA10202-DPB11301 DPA10202-DPB11801 DPA10202-DPB11901; note = HLAs: DPA10202-DPB13101 DPA10202-DPB13801 DPA10202-DPB15501 DPA10202-DPB16501 DPA10301-DPB10101 DPA10301-DPB10201 DPA10301-DPB10202 DPA10301-DPB10401 DPA10301-DPB10402 DPA10301-DPB110501 DPA10301-DPB110601 DPA10301-DPB11101 DPA10301-DPB11301 DPA10301-DPB11801 DPA10301-DPB12301 DPA10301-DPB13901 DPA10301-DPB14001 DPA10301-DPB14901 DPA10301-DPB15501 DPA10301-DPB16501 DPA10301-DPB17501 DPA10301-DPB18001 DPA10401-DPB10101 DPA10401-DPB10201 DPA10401-DPB10202 DPA10401-DPB10402 DPA10401-DPB10501 DPA10401-DPB110501 DPA10401-DPB14901
KEPPILWLGFELVPDKWTVQ

SEQ ID NO: 7258 - protein, 20 aa, synthetic construct
  source 1..20: note = Seed: KEPPFLWMGYELHPDKWTVQ; note = HLAs: DRB1_0101 DPA10103-DPB10101 DPA10103-DPB10201 DPA10103-DPB10202 DPA10103-DPB10401 DPA10103-DPB10402 DPA10103-DPB10501 DPA10103-DPB110501 DPA10103-DPB112601 DPA10103-DPB11501 DPA10103-DPB11601 DPA10103-DPB11801 DPA10103-DPB11901 DPA10103-DPB12301 DPA10103-DPB13101 DPA10103-DPB13401 DPA10103-DPB13901 DPA10103-DPB14001 DPA10103-DPB14101 DPA10103-DPB14801 DPA10103-DPB14901 DPA10103-DPB15001 DPA10103-DPB15101 DPA10103-DPB15501 DPA10103-DPB15901 DPA10103-DPB18001 DPA10104-DPB10101 DPA10104-DPB11501 DPA10105-DPB10101 DPA10105-DPB10401 DPA10105-DPB11801 DPA10105-DPB15001 DPA10106-DPB10101 DPA10201-DPB10101 DPA10201-DPB10201 DPA10201-DPB10202 DPA10201-DPB10401 DPA10201-DPB10501 DPA10201-DPB110601 DPA10201-DPB11501 DPA10201-DPB11601 DPA10201-DPB11901 DPA10201-DPB13401 DPA10201-DPB15501 DPA10202-DPB10101 DPA10202-DPB10201 DPA10202-DPB10202 DPA10202-DPB10401 DPA10202-DPB10501 DPA10202-DPB110601 DPA10202-DPB11101 DPA10202-DPB11301 DPA10202-DPB11801 DPA10202-DPB11901 DPA10202-DPB13101; note = HLAs: DPA10202-DPB13801 DPA10202-DPB15501 DPA10202-DPB16501 DPA10301-DPB10101 DPA10301-DPB10201 DPA10301-DPB10202 DPA10301-DPB10402 DPA10301-DPB110501 DPA10301-DPB110601 DPA10301-DPB11101 DPA10301-DPB11301 DPA10301-DPB11801 DPA10301-DPB14001 DPA10301-DPB14901 DPA10301-DPB15501 DPA10301-DPB16501 DPA10301-DPB17501 DPA10301-DPB18001 DPA10401-DPB10101 DPA10401-DPB10201 DPA10401-DPB10202 DPA10401-DPB10402 DPA10401-DPB10501 DPA10401-DPB110501 DPA10401-DPB14901
KEPPRLWIGFELVPDKWTVQ

SEQ ID NO: 7259 - protein, 20 aa, synthetic construct
  source 1..20: note = Seed: KEPPFLWMGYELHPDKWTVQ; note = HLAs: DPA10103-DPB10101 DPA10103-DPB10201 DPA10103-DPB10202 DPA10103-DPB10401 DPA10103-DPB10402 DPA10103-DPB10501 DPA10103-DPB110501 DPA10103-DPB112601 DPA10103-DPB11501 DPA10103-DPB11601 DPA10103-DPB11801 DPA10103-DPB11901 DPA10103-DPB12301 DPA10103-DPB13101 DPA10103-DPB13401 DPA10103-DPB13901 DPA10103-DPB14001 DPA10103-DPB14101 DPA10103-DPB14801 DPA10103-DPB14901 DPA10103-DPB15001 DPA10103-DPB15101 DPA10103-DPB15501 DPA10103-DPB15901 DPA10103-DPB18001 DPA10104-DPB10101 DPA10104-DPB11501 DPA10105-DPB10101 DPA10105-DPB10401 DPA10105-DPB11801 DPA10105-DPB15001 DPA10106-DPB10101 DPA10201-DPB10101 DPA10201-DPB10201 DPA10201-DPB10202 DPA10201-DPB10401 DPA10201-DPB10501 DPA10201-DPB110601 DPA10201-DPB11501 DPA10201-DPB11601 DPA10201-DPB11901 DPA10201-DPB13401 DPA10201-DPB15501 DPA10202-DPB10101 DPA10202-DPB10201 DPA10202-DPB10202 DPA10202-DPB10401 DPA10202-DPB10501 DPA10202-DPB110601 DPA10202-DPB11101 DPA10202-DPB11301 DPA10202-DPB11801 DPA10202-DPB11901 DPA10202-DPB13101 DPA10202-DPB13801; note = HLAs: DPA10202-DPB15501 DPA10202-DPB16501 DPA10301-DPB10101 DPA10301-DPB10201 DPA10301-DPB10202 DPA10301-DPB10401 DPA10301-DPB10402 DPA10301-DPB110501 DPA10301-DPB110601 DPA10301-DPB11101 DPA10301-DPB11301 DPA10301-DPB11801 DPA10301-DPB12301 DPA10301-DPB13901 DPA10301-DPB14001 DPA10301-DPB14901 DPA10301-DPB15501 DPA10301-DPB16501 DPA10301-DPB17501 DPA10301-DPB18001 DPA10401-DPB10101 DPA10401-DPB10201 DPA10401-DPB10202 DPA10401-DPB10402 DPA10401-DPB10501 DPA10401-DPB110501 DPA10401-DPB14901
KEPPILWTGFELQPDKWTVQ

SEQ ID NO: 7260 - protein, 14 aa, synthetic construct
  source 1..14: note = Seed: PPFLWMGYELHPDK; note = HLAs: DRB1_1001 DPA10103-DPB10101 DPA10103-DPB10201 DPA10103-DPB10202 DPA10103-DPB10401 DPA10103-DPB112601 DPA10103-DPB11501 DPA10103-DPB11601 DPA10103-DPB11901 DPA10103-DPB12301 DPA10103-DPB13101 DPA10103-DPB13401 DPA10103-DPB13901 DPA10103-DPB14001 DPA10103-DPB14101 DPA10103-DPB14801 DPA10103-DPB15001 DPA10103-DPB15901 DPA10104-DPB10101 DPA10104-DPB11501 DPA10105-DPB10101 DPA10105-DPB10401 DPA10105-DPB15001 DPA10106-DPB10101 DPA10201-DPB10101 DPA10201-DPB110601 DPA10201-DPB11501 DPA10201-DPB11601 DPA10201-DPB11901 DPA10202-DPB10101 DPA10202-DPB10201 DPA10202-DPB10202 DPA10202-DPB10401 DPA10202-DPB110601 DPA10202-DPB11901 DPA10202-DPB13101 DPA10202-DPB16501 DPA10301-DPB10101 DPA10301-DPB10201 DPA10301-DPB10202 DPA10301-DPB10401 DPA10301-DPB10402 DPA10301-DPB110501 DPA10301-DPB110601 DPA10301-DPB11801 DPA10301-DPB12301 DPA10301-DPB13901 DPA10301-DPB14001 DPA10301-DPB14901 DPA10301-DPB16501 DPA10301-DPB17501 DPA10301-DPB18001 DPA10401-DPB10101 DPA10401-DPB10201 DPA10401-DPB10202; note = HLAs: DPA10401-DPB10402 DPA10401-DPB10501 DPA10401-DPB110501 DPA10401-DPB14901
PPILWQGFELAPDK

SEQ ID NO: 7261 - protein, 20 aa, synthetic construct
  source 1..20: note = Seed: KEPPFLWMGYELHPDKWTVQ; note = HLAs: DRB1_0101 DRB1_1001 DPA10103-DPB10101 DPA10103-DPB10201 DPA10103-DPB10202 DPA10103-DPB10401 DPA10103-DPB10402 DPA10103-DPB10501 DPA10103-DPB110501 DPA10103-DPB112601 DPA10103-DPB11501 DPA10103-DPB11601 DPA10103-DPB11801 DPA10103-DPB11901 DPA10103-DPB12301 DPA10103-DPB13101 DPA10103-DPB13401 DPA10103-DPB13901 DPA10103-DPB14001 DPA10103-DPB14101 DPA10103-DPB14801 DPA10103-DPB14901 DPA10103-DPB15001 DPA10103-DPB15101 DPA10103-DPB15501 DPA10103-DPB15901 DPA10103-DPB18001 DPA10104-DPB10101 DPA10104-DPB11501 DPA10105-DPB10101 DPA10105-DPB10401 DPA10105-DPB11801 DPA10105-DPB15001 DPA10106-DPB10101 DPA10201-DPB10101 DPA10201-DPB10201 DPA10201-DPB10202 DPA10201-DPB10401 DPA10201-DPB10501 DPA10201-DPB110601 DPA10201-DPB11501 DPA10201-DPB11601 DPA10201-DPB11901 DPA10201-DPB13401 DPA10201-DPB15501 DPA10202-DPB10101 DPA10202-DPB10201 DPA10202-DPB10202 DPA10202-DPB10401 DPA10202-DPB10501 DPA10202-DPB110601 DPA10202-DPB11101 DPA10202-DPB11301 DPA10202-DPB11801 DPA10202-DPB11901; note = HLAs: DPA10202-DPB13101 DPA10202-DPB13801 DPA10202-DPB15501 DPA10202-DPB16501 DPA10301-DPB10101 DPA10301-DPB10201 DPA10301-DPB10202 DPA10301-DPB10401 DPA10301-DPB10402 DPA10301-DPB110501 DPA10301-DPB110601 DPA10301-DPB11101 DPA10301-DPB11301 DPA10301-DPB11801 DPA10301-DPB12301 DPA10301-DPB13901 DPA10301-DPB14001 DPA10301-DPB14901 DPA10301-DPB15501 DPA10301-DPB16501 DPA10301-DPB17501 DPA10301-DPB18001 DPA10401-DPB10101 DPA10401-DPB10201 DPA10401-DPB10202 DPA10401-DPB10402 DPA10401-DPB10501 DPA10401-DPB110501 DPA10401-DPB14901
KEPPFLWSGLELNPDKWTVQ

SEQ ID NO: 7262 - protein, 14 aa, synthetic construct
  source 1..14: note = Seed: PPFLWMGYELHPDK; note = HLAs: DPA10103-DPB10101 DPA10103-DPB10201 DPA10103-DPB10202 DPA10103-DPB10401 DPA10103-DPB112601 DPA10103-DPB11501 DPA10103-DPB11601 DPA10103-DPB11901 DPA10103-DPB12301 DPA10103-DPB13101 DPA10103-DPB13401 DPA10103-DPB13901 DPA10103-DPB14001 DPA10103-DPB14101 DPA10103-DPB14801 DPA10103-DPB15001 DPA10103-DPB15901 DPA10104-DPB10101 DPA10104-DPB11501 DPA10105-DPB10101 DPA10105-DPB10401 DPA10105-DPB15001 DPA10106-DPB10101 DPA10201-DPB10101 DPA10201-DPB110601 DPA10201-DPB11501 DPA10201-DPB11601 DPA10201-DPB11901 DPA10202-DPB10101 DPA10202-DPB10201 DPA10202-DPB10202 DPA10202-DPB10401 DPA10202-DPB110601 DPA10202-DPB11901 DPA10202-DPB13101 DPA10202-DPB16501 DPA10301-DPB10101 DPA10301-DPB10201 DPA10301-DPB10202 DPA10301-DPB10401 DPA10301-DPB10402 DPA10301-DPB110501 DPA10301-DPB110601 DPA10301-DPB11801 DPA10301-DPB12301 DPA10301-DPB13901 DPA10301-DPB14001 DPA10301-DPB14901 DPA10301-DPB15501 DPA10301-DPB16501 DPA10301-DPB17501 DPA10301-DPB18001 DPA10401-DPB10101 DPA10401-DPB10201; note = HLAs: DPA10401-DPB10202 DPA10401-DPB10402 DPA10401-DPB10501 DPA10401-DPB110501 DPA10401-DPB14901
PPFLWGGYELLPDK

SEQ ID NO: 7263 - protein, 14 aa, synthetic construct
  source 1..14: note = Seed: PPFLWMGYELHPDK; note = HLAs: DRB1_1001 DPA10103-DPB10101 DPA10103-DPB10201 DPA10103-DPB10202 DPA10103-DPB10401 DPA10103-DPB112601 DPA10103-DPB11501 DPA10103-DPB11601 DPA10103-DPB11901 DPA10103-DPB12301 DPA10103-DPB13101 DPA10103-DPB13401 DPA10103-DPB13901 DPA10103-DPB14001 DPA10103-DPB14101 DPA10103-DPB14801 DPA10103-DPB15001 DPA10103-DPB15901 DPA10104-DPB10101 DPA10104-DPB11501 DPA10105-DPB10101 DPA10105-DPB10401 DPA10105-DPB15001 DPA10106-DPB10101 DPA10201-DPB10101 DPA10201-DPB110601 DPA10201-DPB11501 DPA10201-DPB11601 DPA10201-DPB11901 DPA10202-DPB10101 DPA10202-DPB10201 DPA10202-DPB10202 DPA10202-DPB10401 DPA10202-DPB110601 DPA10202-DPB11901 DPA10202-DPB13101 DPA10202-DPB16501 DPA10301-DPB10101 DPA10301-DPB10201 DPA10301-DPB10202 DPA10301-DPB10401 DPA10301-DPB10402 DPA10301-DPB110501 DPA10301-DPB110601 DPA10301-DPB11801 DPA10301-DPB12301 DPA10301-DPB13901 DPA10301-DPB14001 DPA10301-DPB14901 DPA10301-DPB15501 DPA10301-DPB16501 DPA10301-DPB17501 DPA10301-DPB18001 DPA10401-DPB10101 DPA10401-DPB10201; note = HLAs: DPA10401-DPB10202 DPA10401-DPB10402 DPA10401-DPB10501 DPA10401-DPB110501 DPA10401-DPB14901
PPYLWAGWELIPDK

SEQ ID NO: 7264 - protein, 14 aa, synthetic construct
  source 1..14: note = Seed: PPFLWMGYELHPDK; note = HLAs: DPA10103-DPB10101 DPA10103-DPB10201 DPA10103-DPB10202 DPA10103-DPB10401 DPA10103-DPB112601 DPA10103-DPB11501 DPA10103-DPB11601 DPA10103-DPB11901 DPA10103-DPB12301 DPA10103-DPB13101 DPA10103-DPB13401 DPA10103-DPB13901 DPA10103-DPB14001 DPA10103-DPB14101 DPA10103-DPB14801 DPA10103-DPB15001 DPA10103-DPB15901 DPA10104-DPB10101 DPA10104-DPB11501 DPA10105-DPB10101 DPA10105-DPB10401 DPA10105-DPB15001 DPA10106-DPB10101 DPA10201-DPB10101 DPA10201-DPB110601 DPA10201-DPB11501 DPA10201-DPB11601 DPA10201-DPB11901 DPA10202-DPB10101 DPA10202-DPB10201 DPA10202-DPB10202 DPA10202-DPB10401 DPA10202-DPB110601 DPA10202-DPB11901 DPA10202-DPB13101 DPA10202-DPB16501 DPA10301-DPB10101 DPA10301-DPB10201 DPA10301-DPB10202 DPA10301-DPB10401 DPA10301-DPB10402 DPA10301-DPB110501 DPA10301-DPB110601 DPA10301-DPB11801 DPA10301-DPB12301 DPA10301-DPB13901 DPA10301-DPB14001 DPA10301-DPB14901 DPA10301-DPB15501 DPA10301-DPB16501 DPA10301-DPB17501 DPA10301-DPB18001 DPA10401-DPB10101 DPA10401-DPB10201; note = HLAs: DPA10401-DPB10202 DPA10401-DPB10402 DPA10401-DPB10501 DPA10401-DPB110501 DPA10401-DPB14901
PPWLWSGWELVPDK

SEQ ID NO: 7265 - protein, 14 aa, synthetic construct
  source 1..14: note = Seed: PPFLWMGYELHPDK; note = HLAs: DPA10103-DPB10101 DPA10103-DPB10201 DPA10103-DPB10202 DPA10103-DPB10401 DPA10103-DPB112601 DPA10103-DPB11501 DPA10103-DPB11601 DPA10103-DPB11901 DPA10103-DPB12301 DPA10103-DPB13101 DPA10103-DPB13401 DPA10103-DPB13901 DPA10103-DPB14001 DPA10103-DPB14101 DPA10103-DPB14801 DPA10103-DPB15001 DPA10103-DPB15901 DPA10104-DPB10101 DPA10104-DPB11501 DPA10105-DPB10101 DPA10105-DPB10401 DPA10105-DPB15001 DPA10106-DPB10101 DPA10201-DPB10101 DPA10201-DPB110601 DPA10201-DPB11501 DPA10201-DPB11601 DPA10201-DPB11901 DPA10202-DPB10101 DPA10202-DPB10201 DPA10202-DPB10202 DPA10202-DPB10401 DPA10202-DPB110601 DPA10202-DPB11901 DPA10202-DPB13101 DPA10202-DPB16501 DPA10301-DPB10101 DPA10301-DPB10201 DPA10301-DPB10202 DPA10301-DPB10401 DPA10301-DPB10402 DPA10301-DPB110501 DPA10301-DPB110601 DPA10301-DPB11801 DPA10301-DPB12301 DPA10301-DPB13901 DPA10301-DPB14001 DPA10301-DPB14901 DPA10301-DPB15501 DPA10301-DPB16501 DPA10301-DPB17501 DPA10301-DPB18001 DPA10401-DPB10101 DPA10401-DPB10201; note = HLAs: DPA10401-DPB10202 DPA10401-DPB10402 DPA10401-DPB10501 DPA10401-DPB110501 DPA10401-DPB14901
PPFLWDGYELVPDK

SEQ ID NO: 7266 - protein, 14 aa, synthetic construct
  source 1..14: note = Seed: PPFLWMGYELHPDK; note = HLAs: DRB1_1001 DPA10103-DPB10101 DPA10103-DPB10201 DPA10103-DPB10202 DPA10103-DPB10401 DPA10103-DPB112601 DPA10103-DPB11501 DPA10103-DPB11601 DPA10103-DPB11901 DPA10103-DPB12301 DPA10103-DPB13101 DPA10103-DPB13401 DPA10103-DPB13901 DPA10103-DPB14001 DPA10103-DPB14101 DPA10103-DPB14801 DPA10103-DPB15001 DPA10103-DPB15901 DPA10104-DPB10101 DPA10104-DPB11501 DPA10105-DPB10101 DPA10105-DPB10401 DPA10105-DPB15001 DPA10106-DPB10101 DPA10201-DPB10101 DPA10201-DPB110601 DPA10201-DPB11501 DPA10201-DPB11601 DPA10201-DPB11901 DPA10202-DPB10101 DPA10202-DPB10201 DPA10202-DPB10202 DPA10202-DPB10401 DPA10202-DPB110601 DPA10202-DPB11901 DPA10202-DPB13101 DPA10202-DPB16501 DPA10301-DPB10101 DPA10301-DPB10201 DPA10301-DPB10202 DPA10301-DPB10401 DPA10301-DPB10402 DPA10301-DPB110501 DPA10301-DPB110601 DPA10301-DPB11801 DPA10301-DPB12301 DPA10301-DPB13901 DPA10301-DPB14001 DPA10301-DPB14901 DPA10301-DPB15501 DPA10301-DPB16501 DPA10301-DPB17501 DPA10301-DPB18001 DPA10401-DPB10101 DPA10401-DPB10201; note = HLAs: DPA10401-DPB10202 DPA10401-DPB10402 DPA10401-DPB10501 DPA10401-DPB110501 DPA10401-DPB14901
PPYLWVGWELVPDK

SEQ ID NO: 7267 - protein, 20 aa, synthetic construct
  source 1..20: note = Seed: KEPPFLWMGYELHPDKWTVQ; note = HLAs: DRB1_0101 DPA10103-DPB10101 DPA10103-DPB10201 DPA10103-DPB10202 DPA10103-DPB10401 DPA10103-DPB10402 DPA10103-DPB10501 DPA10103-DPB110501 DPA10103-DPB112601 DPA10103-DPB11501 DPA10103-DPB11601 DPA10103-DPB11801 DPA10103-DPB11901 DPA10103-DPB12301 DPA10103-DPB13101 DPA10103-DPB13401 DPA10103-DPB13901 DPA10103-DPB14001 DPA10103-DPB14101 DPA10103-DPB14801 DPA10103-DPB14901 DPA10103-DPB15001 DPA10103-DPB15101 DPA10103-DPB15501 DPA10103-DPB15901 DPA10103-DPB18001 DPA10104-DPB10101 DPA10104-DPB11501 DPA10105-DPB10101 DPA10105-DPB10401 DPA10105-DPB11801 DPA10105-DPB15001 DPA10106-DPB10101 DPA10201-DPB10101 DPA10201-DPB10201 DPA10201-DPB10202 DPA10201-DPB10401 DPA10201-DPB10501 DPA10201-DPB110601 DPA10201-DPB11501 DPA10201-DPB11601 DPA10201-DPB11901 DPA10201-DPB13401 DPA10201-DPB15501 DPA10202-DPB10101 DPA10202-DPB10201 DPA10202-DPB10202 DPA10202-DPB10401 DPA10202-DPB10501 DPA10202-DPB110601 DPA10202-DPB11101 DPA10202-DPB11301 DPA10202-DPB11801 DPA10202-DPB11901 DPA10202-DPB13101; note = HLAs: DPA10202-DPB13801 DPA10202-DPB15501 DPA10202-DPB16501 DPA10301-DPB10101 DPA10301-DPB10201 DPA10301-DPB10202 DPA10301-DPB10401 DPA10301-DPB10402 DPA10301-DPB110501 DPA10301-DPB110601 DPA10301-DPB11101 DPA10301-DPB11301 DPA10301-DPB11801 DPA10301-DPB12301 DPA10301-DPB13901 DPA10301-DPB14001 DPA10301-DPB14901 DPA10301-DPB15501 DPA10301-DPB16501 DPA10301-DPB17501 DPA10301-DPB18001 DPA10401-DPB10101 DPA10401-DPB10201 DPA10401-DPB10202 DPA10401-DPB10402 DPA10401-DPB10501 DPA10401-DPB110501 DPA10401-DPB14901
KEPPFLWIGWELYPDKWTVQ

SEQ ID NO: 7268 - protein, 20 aa, synthetic construct
  source 1..20: note = Seed: KEPPFLWMGYELHPDKWTVQ; note = HLAs: DRB1_0101 DRB1_1001 DPA10103-DPB10101 DPA10103-DPB10201 DPA10103-DPB10202 DPA10103-DPB10401 DPA10103-DPB10402 DPA10103-DPB10501 DPA10103-DPB110501 DPA10103-DPB112601 DPA10103-DPB11501 DPA10103-DPB11601 DPA10103-DPB11801 DPA10103-DPB11901 DPA10103-DPB12301 DPA10103-DPB13101 DPA10103-DPB13401 DPA10103-DPB13901 DPA10103-DPB14001 DPA10103-DPB14101 DPA10103-DPB14801 DPA10103-DPB14901 DPA10103-DPB15001 DPA10103-DPB15101 DPA10103-DPB15501 DPA10103-DPB15901 DPA10103-DPB18001 DPA10104-DPB10101 DPA10104-DPB11501 DPA10105-DPB10101 DPA10105-DPB10401 DPA10105-DPB11801 DPA10105-DPB15001 DPA10106-DPB10101 DPA10201-DPB10101 DPA10201-DPB10201 DPA10201-DPB10202 DPA10201-DPB10401 DPA10201-DPB10501 DPA10201-DPB110601 DPA10201-DPB11501 DPA10201-DPB11601 DPA10201-DPB11901 DPA10201-DPB13401 DPA10201-DPB15501 DPA10202-DPB10101 DPA10202-DPB10201 DPA10202-DPB10202 DPA10202-DPB10401 DPA10202-DPB10501 DPA10202-DPB110601 DPA10202-DPB11101 DPA10202-DPB11301 DPA10202-DPB11801 DPA10202-DPB11901; note = HLAs: DPA10202-DPB13101 DPA10202-DPB13801 DPA10202-DPB15501 DPA10202-DPB16501 DPA10301-DPB10101 DPA10301-DPB10201 DPA10301-DPB10202 DPA10301-DPB10401 DPA10301-DPB10402 DPA10301-DPB110501 DPA10301-DPB110601 DPA10301-DPB11101 DPA10301-DPB11301 DPA10301-DPB11801 DPA10301-DPB12301 DPA10301-DPB13901 DPA10301-DPB14001 DPA10301-DPB14901 DPA10301-DPB15501 DPA10301-DPB16501 DPA10301-DPB17501 DPA10301-DPB18001 DPA10401-DPB10101 DPA10401-DPB10201 DPA10401-DPB10202 DPA10401-DPB10402 DPA10401-DPB10501 DPA10401-DPB110501 DPA10401-DPB14901
KEPPFLWWGLELVPDKWTVQ

SEQ ID NO: 7269 - protein, 20 aa, synthetic construct
  source 1..20: note = Seed: KEPPFLWMGYELHPDKWTVQ; note = HLAs: DPA10103-DPB10201 DPA10103-DPB10202 DPA10103-DPB10401 DPA10103-DPB10402 DPA10103-DPB10501 DPA10103-DPB110501 DPA10103-DPB112601 DPA10103-DPB11501 DPA10103-DPB11601 DPA10103-DPB11801 DPA10103-DPB11901 DPA10103-DPB12301 DPA10103-DPB13101 DPA10103-DPB13401 DPA10103-DPB13901 DPA10103-DPB14001 DPA10103-DPB14101 DPA10103-DPB14801 DPA10103-DPB14901 DPA10103-DPB15001 DPA10103-DPB15101 DPA10103-DPB15501 DPA10103-DPB15901 DPA10103-DPB18001 DPA10104-DPB11501 DPA10105-DPB10401 DPA10105-DPB11801 DPA10105-DPB15001 DPA10106-DPB10101 DPA10201-DPB10101 DPA10201-DPB10201 DPA10201-DPB10202 DPA10201-DPB10401 DPA10201-DPB10501 DPA10201-DPB110601 DPA10201-DPB11501 DPA10201-DPB11601 DPA10201-DPB11901 DPA10201-DPB13401 DPA10201-DPB15501 DPA10202-DPB10101 DPA10202-DPB10201 DPA10202-DPB10202 DPA10202-DPB10401 DPA10202-DPB10501 DPA10202-DPB110601 DPA10202-DPB11301 DPA10202-DPB11801 DPA10202-DPB11901 DPA10202-DPB13101 DPA10202-DPB13801 DPA10202-DPB15501 DPA10202-DPB16501 DPA10301-DPB10101 DPA10301-DPB10201; note = HLAs: DPA10301-DPB10202 DPA10301-DPB10401 DPA10301-DPB10402 DPA10301-DPB110501 DPA10301-DPB110601 DPA10301-DPB11301 DPA10301-DPB11801 DPA10301-DPB12301 DPA10301-DPB13901 DPA10301-DPB14001 DPA10301-DPB14901 DPA10301-DPB15501 DPA10301-DPB16501 DPA10301-DPB17501 DPA10301-DPB18001 DPA10401-DPB10101 DPA10401-DPB10201 DPA10401-DPB10202 DPA10401-DPB10402 DPA10401-DPB10501 DPA10401-DPB110501 DPA10401-DPB14901
KEPPILWHGLELLPDKWTVQ

SEQ ID NO: 7270 - protein, 14 aa, synthetic construct
  source 1..14: note = Seed: PPFLWMGYELHPDK; note = HLAs: DPA10103-DPB10101 DPA10103-DPB10201 DPA10103-DPB10202 DPA10103-DPB10401 DPA10103-DPB112601 DPA10103-DPB11501 DPA10103-DPB11601 DPA10103-DPB11901 DPA10103-DPB12301 DPA10103-DPB13101 DPA10103-DPB13401 DPA10103-DPB13901 DPA10103-DPB14001 DPA10103-DPB14101 DPA10103-DPB14801 DPA10103-DPB15001 DPA10103-DPB15901 DPA10104-DPB10101 DPA10104-DPB11501 DPA10105-DPB10101 DPA10105-DPB10401 DPA10105-DPB15001 DPA10106-DPB10101 DPA10201-DPB10101 DPA10201-DPB110601 DPA10201-DPB11501 DPA10201-DPB11601 DPA10201-DPB11901 DPA10202-DPB10101 DPA10202-DPB10201 DPA10202-DPB10202 DPA10202-DPB10401 DPA10202-DPB110601 DPA10202-DPB11901 DPA10202-DPB13101 DPA10202-DPB16501 DPA10301-DPB10101 DPA10301-DPB10201 DPA10301-DPB10202 DPA10301-DPB10401 DPA10301-DPB10402 DPA10301-DPB110501 DPA10301-DPB110601 DPA10301-DPB11801 DPA10301-DPB12301 DPA10301-DPB13901 DPA10301-DPB14001 DPA10301-DPB14901 DPA10301-DPB16501 DPA10301-DPB17501 DPA10301-DPB18001 DPA10401-DPB10101 DPA10401-DPB10201 DPA10401-DPB10202; note = HLAs: DPA10401-DPB10402 DPA10401-DPB10501 DPA10401-DPB110501 DPA10401-DPB14901
PPMLWAGFELAPDK

SEQ ID NO: 7271 - protein, 14 aa, synthetic construct
  source 1..14: note = Seed: PPFLWMGYELHPDK; note = HLAs: DRB1_1001 DPA10103-DPB10101 DPA10103-DPB10201 DPA10103-DPB10202 DPA10103-DPB10401 DPA10103-DPB112601 DPA10103-DPB11501 DPA10103-DPB11601 DPA10103-DPB11901 DPA10103-DPB12301 DPA10103-DPB13101 DPA10103-DPB13401 DPA10103-DPB13901 DPA10103-DPB14001 DPA10103-DPB14101 DPA10103-DPB14801 DPA10103-DPB15001 DPA10103-DPB15901 DPA10104-DPB10101 DPA10104-DPB11501 DPA10105-DPB10101 DPA10105-DPB10401 DPA10105-DPB15001 DPA10106-DPB10101 DPA10201-DPB10101 DPA10201-DPB110601 DPA10201-DPB11501 DPA10201-DPB11601 DPA10201-DPB11901 DPA10202-DPB10101 DPA10202-DPB10201 DPA10202-DPB10202 DPA10202-DPB10401 DPA10202-DPB110601 DPA10202-DPB11901 DPA10202-DPB13101 DPA10202-DPB16501 DPA10301-DPB10101 DPA10301-DPB10201 DPA10301-DPB10202 DPA10301-DPB10401 DPA10301-DPB10402 DPA10301-DPB110501 DPA10301-DPB110601 DPA10301-DPB11801 DPA10301-DPB12301 DPA10301-DPB13901 DPA10301-DPB14001 DPA10301-DPB14901 DPA10301-DPB15501 DPA10301-DPB16501 DPA10301-DPB17501 DPA10301-DPB18001 DPA10401-DPB10101 DPA10401-DPB10201; note = HLAs: DPA10401-DPB10202 DPA10401-DPB10402 DPA10401-DPB10501 DPA10401-DPB110501 DPA10401-DPB14901
PPFLWIGVELVPDK

SEQ ID NO: 7272 - protein, 14 aa, synthetic construct
  source 1..14: note = Seed: PPFLWMGYELHPDK; note = HLAs: DRB1_1001 DPA10103-DPB10101 DPA10103-DPB10201 DPA10103-DPB10202 DPA10103-DPB10401 DPA10103-DPB112601 DPA10103-DPB11501 DPA10103-DPB11601 DPA10103-DPB11901 DPA10103-DPB12301 DPA10103-DPB13101 DPA10103-DPB13401 DPA10103-DPB13901 DPA10103-DPB14001 DPA10103-DPB14101 DPA10103-DPB14801 DPA10103-DPB15001 DPA10103-DPB15901 DPA10104-DPB10101 DPA10104-DPB11501 DPA10105-DPB10101 DPA10105-DPB10401 DPA10105-DPB15001 DPA10106-DPB10101 DPA10201-DPB10101 DPA10201-DPB110601 DPA10201-DPB11501 DPA10201-DPB11601 DPA10201-DPB11901 DPA10202-DPB10101 DPA10202-DPB10201 DPA10202-DPB10202 DPA10202-DPB10401 DPA10202-DPB110601 DPA10202-DPB11901 DPA10202-DPB13101 DPA10202-DPB16501 DPA10301-DPB10101 DPA10301-DPB10201 DPA10301-DPB10202 DPA10301-DPB10401 DPA10301-DPB10402 DPA10301-DPB110501 DPA10301-DPB110601 DPA10301-DPB11801 DPA10301-DPB12301 DPA10301-DPB13901 DPA10301-DPB14001 DPA10301-DPB14901 DPA10301-DPB15501 DPA10301-DPB16501 DPA10301-DPB17501 DPA10301-DPB18001 DPA10401-DPB10101 DPA10401-DPB10201; note = HLAs: DPA10401-DPB10202 DPA10401-DPB10402 DPA10401-DPB10501 DPA10401-DPB110501 DPA10401-DPB14901
PPFLWAGFELGPDK

SEQ ID NO: 7273 - protein, 14 aa, synthetic construct
  source 1..14: note = Seed: PPFLWMGYELHPDK; note = HLAs: DPA10103-DPB10101 DPA10103-DPB10201 DPA10103-DPB10202 DPA10103-DPB10401 DPA10103-DPB112601 DPA10103-DPB11501 DPA10103-DPB11601 DPA10103-DPB11901 DPA10103-DPB12301 DPA10103-DPB13101 DPA10103-DPB13401 DPA10103-DPB13901 DPA10103-DPB14001 DPA10103-DPB14101 DPA10103-DPB14801 DPA10103-DPB15001 DPA10103-DPB15901 DPA10104-DPB10101 DPA10104-DPB11501 DPA10105-DPB10101 DPA10105-DPB10401 DPA10105-DPB15001 DPA10106-DPB10101 DPA10201-DPB10101 DPA10201-DPB110601 DPA10201-DPB11501 DPA10201-DPB11601 DPA10201-DPB11901 DPA10202-DPB10101 DPA10202-DPB10201 DPA10202-DPB10202 DPA10202-DPB10401 DPA10202-DPB110601 DPA10202-DPB11901 DPA10202-DPB13101 DPA10202-DPB16501 DPA10301-DPB10101 DPA10301-DPB10201 DPA10301-DPB10202 DPA10301-DPB10401 DPA10301-DPB10402 DPA10301-DPB110501 DPA10301-DPB110601 DPA10301-DPB11801 DPA10301-DPB12301 DPA10301-DPB13901 DPA10301-DPB14001 DPA10301-DPB14901 DPA10301-DPB15501 DPA10301-DPB16501 DPA10301-DPB17501 DPA10301-DPB18001 DPA10401-DPB10101 DPA10401-DPB10201; note = HLAs: DPA10401-DPB10202 DPA10401-DPB10402 DPA10401-DPB10501 DPA10401-DPB110501 DPA10401-DPB14901
PPWLWEGFELSPDK

SEQ ID NO: 7274 - protein, 20 aa, synthetic construct
  source 1..20: note = Seed: KEPPFLWMGYELHPDKWTVQ; note = HLAs: DRB1_0101 DRB1_0405 DRB1_1001 DPA10103-DPB10401 DPA10103-DPB10402 DPA10103-DPB110501 DPA10103-DPB112601 DPA10103-DPB11501 DPA10103-DPB11801 DPA10103-DPB12301 DPA10103-DPB13401 DPA10103-DPB13901 DPA10103-DPB14001 DPA10103-DPB14101 DPA10103-DPB14901 DPA10103-DPB15101 DPA10103-DPB15901 DPA10103-DPB18001 DPA10104-DPB11501 DPA10105-DPB10401 DPA10105-DPB11801 DPA10106-DPB10101 DPA10201-DPB10101 DPA10201-DPB10201 DPA10201-DPB10202 DPA10201-DPB10401 DPA10201-DPB10501 DPA10201-DPB110601 DPA10201-DPB11501 DPA10201-DPB11601 DPA10201-DPB11901 DPA10201-DPB13401 DPA10201-DPB15501 DPA10202-DPB10101 DPA10202-DPB10201 DPA10202-DPB10202 DPA10202-DPB10401 DPA10202-DPB10501 DPA10202-DPB110601 DPA10202-DPB11101 DPA10202-DPB11301 DPA10202-DPB11801 DPA10202-DPB11901 DPA10202-DPB13101 DPA10202-DPB13801 DPA10202-DPB15501 DPA10202-DPB16501 DPA10301-DPB10101 DPA10301-DPB10201 DPA10301-DPB10202 DPA10301-DPB10401 DPA10301-DPB10402 DPA10301-DPB110501 DPA10301-DPB110601 DPA10301-DPB11101 DPA10301-DPB11301; note = HLAs: DPA10301-DPB11801 DPA10301-DPB12301 DPA10301-DPB13901 DPA10301-DPB14001 DPA10301-DPB14901 DPA10301-DPB15501 DPA10301-DPB16501 DPA10301-DPB17501 DPA10301-DPB18001 DPA10401-DPB10402 DPA10401-DPB110501 DPA10401-DPB14901
KEPPFLWVGSELLPDKWTVQ

SEQ ID NO: 7275 - protein, 20 aa, synthetic construct
  source 1..20: note = Seed: KEPPFLWMGYELHPDKWTVQ; note = HLAs: DPA10103-DPB10101 DPA10103-DPB10201 DPA10103-DPB10202 DPA10103-DPB10401 DPA10103-DPB10402 DPA10103-DPB10501 DPA10103-DPB110501 DPA10103-DPB112601 DPA10103-DPB11501 DPA10103-DPB11601 DPA10103-DPB11801 DPA10103-DPB11901 DPA10103-DPB12301 DPA10103-DPB13101 DPA10103-DPB13401 DPA10103-DPB13901 DPA10103-DPB14001 DPA10103-DPB14101 DPA10103-DPB14801 DPA10103-DPB14901 DPA10103-DPB15001 DPA10103-DPB15101 DPA10103-DPB15501 DPA10103-DPB15901 DPA10103-DPB18001 DPA10104-DPB10101 DPA10104-DPB11501 DPA10105-DPB10101 DPA10105-DPB10401 DPA10105-DPB11801 DPA10105-DPB15001 DPA10106-DPB10101 DPA10201-DPB10101 DPA10201-DPB10201 DPA10201-DPB10202 DPA10201-DPB10501 DPA10201-DPB110601 DPA10201-DPB11501 DPA10201-DPB11601 DPA10201-DPB11901 DPA10201-DPB13401 DPA10201-DPB15501 DPA10202-DPB10101 DPA10202-DPB10201 DPA10202-DPB10202 DPA10202-DPB10401 DPA10202-DPB10501 DPA10202-DPB110601 DPA10202-DPB11101 DPA10202-DPB11301 DPA10202-DPB11801 DPA10202-DPB11901 DPA10202-DPB13101 DPA10202-DPB13801 DPA10202-DPB15501; note = HLAs: DPA10202-DPB16501 DPA10301-DPB10101 DPA10301-DPB10201 DPA10301-DPB10202 DPA10301-DPB10401 DPA10301-DPB10402 DPA10301-DPB110501 DPA10301-DPB110601 DPA10301-DPB11101 DPA10301-DPB11801 DPA10301-DPB12301 DPA10301-DPB13901 DPA10301-DPB14001 DPA10301-DPB14901 DPA10301-DPB15501 DPA10301-DPB16501 DPA10301-DPB17501 DPA10301-DPB18001 DPA10401-DPB10101 DPA10401-DPB10201 DPA10401-DPB10202 DPA10401-DPB10402 DPA10401-DPB10501 DPA10401-DPB110501 DPA10401-DPB14901
KEPPLLWAGFELHPDKWTVQ

SEQ ID NO: 7276 - protein, 14 aa, synthetic construct
  source 1..14: note = Seed: PPFLWMGYELHPDK; note = HLAs: DPA10103-DPB10101 DPA10103-DPB10201 DPA10103-DPB10202 DPA10103-DPB10401 DPA10103-DPB112601 DPA10103-DPB11501 DPA10103-DPB11601 DPA10103-DPB11901 DPA10103-DPB12301 DPA10103-DPB13101 DPA10103-DPB13401 DPA10103-DPB13901 DPA10103-DPB14001 DPA10103-DPB14101 DPA10103-DPB14801 DPA10103-DPB15001 DPA10103-DPB15901 DPA10104-DPB10101 DPA10104-DPB11501 DPA10105-DPB10101 DPA10105-DPB10401 DPA10105-DPB15001 DPA10106-DPB10101 DPA10201-DPB10101 DPA10201-DPB110601 DPA10201-DPB11501 DPA10201-DPB11601 DPA10201-DPB11901 DPA10202-DPB10101 DPA10202-DPB10201 DPA10202-DPB10202 DPA10202-DPB10401 DPA10202-DPB110601 DPA10202-DPB11901 DPA10202-DPB13101 DPA10202-DPB16501 DPA10301-DPB10101 DPA10301-DPB10201 DPA10301-DPB10202 DPA10301-DPB10401 DPA10301-DPB10402 DPA10301-DPB110501 DPA10301-DPB110601 DPA10301-DPB11801 DPA10301-DPB12301 DPA10301-DPB13901 DPA10301-DPB14001 DPA10301-DPB14901 DPA10301-DPB15501 DPA10301-DPB16501 DPA10301-DPB17501 DPA10301-DPB18001 DPA10401-DPB10101 DPA10401-DPB10201; note = HLAs: DPA10401-DPB10202 DPA10401-DPB10402 DPA10401-DPB110501 DPA10401-DPB14901
PPILWGGFELIPDK

SEQ ID NO: 7277 - protein, 14 aa, synthetic construct
  source 1..14: note = Seed: PPFLWMGYELHPDK; note = HLAs: DPA10103-DPB10101 DPA10103-DPB10201 DPA10103-DPB10202 DPA10103-DPB10401 DPA10103-DPB112601 DPA10103-DPB11501 DPA10103-DPB11601 DPA10103-DPB11901 DPA10103-DPB12301 DPA10103-DPB13101 DPA10103-DPB13401 DPA10103-DPB13901 DPA10103-DPB14001 DPA10103-DPB14101 DPA10103-DPB14801 DPA10103-DPB15001 DPA10103-DPB15901 DPA10104-DPB10101 DPA10104-DPB11501 DPA10105-DPB10101 DPA10105-DPB10401 DPA10105-DPB15001 DPA10106-DPB10101 DPA10201-DPB10101 DPA10201-DPB110601 DPA10201-DPB11501 DPA10201-DPB11601 DPA10201-DPB11901 DPA10202-DPB10101 DPA10202-DPB10201 DPA10202-DPB10202 DPA10202-DPB10401 DPA10202-DPB110601 DPA10202-DPB11901 DPA10202-DPB13101 DPA10202-DPB16501 DPA10301-DPB10101 DPA10301-DPB10201 DPA10301-DPB10202 DPA10301-DPB10401 DPA10301-DPB10402 DPA10301-DPB110501 DPA10301-DPB110601 DPA10301-DPB11801 DPA10301-DPB12301 DPA10301-DPB13901 DPA10301-DPB14001 DPA10301-DPB14901 DPA10301-DPB15501 DPA10301-DPB16501 DPA10301-DPB17501 DPA10301-DPB18001 DPA10401-DPB10101 DPA10401-DPB10201; note = HLAs: DPA10401-DPB10202 DPA10401-DPB10402 DPA10401-DPB10501 DPA10401-DPB110501 DPA10401-DPB14901
PPFLWKGFELNPDK

SEQ ID NO: 7278 - protein, 20 aa, synthetic construct
  source 1..20: note = Seed: KEPPFLWMGYELHPDKWTVQ; note = HLAs: DRB1_1001 DPA10103-DPB10101 DPA10103-DPB10201 DPA10103-DPB10202 DPA10103-DPB10401 DPA10103-DPB10402 DPA10103-DPB10501 DPA10103-DPB110501 DPA10103-DPB112601 DPA10103-DPB11501 DPA10103-DPB11601 DPA10103-DPB11801 DPA10103-DPB11901 DPA10103-DPB12301 DPA10103-DPB13101 DPA10103-DPB13401 DPA10103-DPB13901 DPA10103-DPB14001 DPA10103-DPB14101 DPA10103-DPB14801 DPA10103-DPB14901 DPA10103-DPB15001 DPA10103-DPB15101 DPA10103-DPB15501 DPA10103-DPB15901 DPA10103-DPB18001 DPA10104-DPB10101 DPA10104-DPB11501 DPA10105-DPB10101 DPA10105-DPB10401 DPA10105-DPB11801 DPA10105-DPB15001 DPA10106-DPB10101 DPA10201-DPB10101 DPA10201-DPB10201 DPA10201-DPB10202 DPA10201-DPB10401 DPA10201-DPB10501 DPA10201-DPB110601 DPA10201-DPB11501 DPA10201-DPB11601 DPA10201-DPB11901 DPA10201-DPB13401 DPA10202-DPB10101 DPA10202-DPB10201 DPA10202-DPB10202 DPA10202-DPB10401 DPA10202-DPB10501 DPA10202-DPB110601 DPA10202-DPB11801 DPA10202-DPB11901 DPA10202-DPB13101 DPA10202-DPB13801 DPA10202-DPB15501 DPA10202-DPB16501; note = HLAs: DPA10301-DPB10101 DPA10301-DPB10201 DPA10301-DPB10202 DPA10301-DPB10401 DPA10301-DPB10402 DPA10301-DPB110501 DPA10301-DPB110601 DPA10301-DPB11801 DPA10301-DPB12301 DPA10301-DPB13901 DPA10301-DPB14001 DPA10301-DPB14901 DPA10301-DPB15501 DPA10301-DPB16501 DPA10301-DPB17501 DPA10301-DPB18001 DPA10401-DPB10101 DPA10401-DPB10201 DPA10401-DPB10202 DPA10401-DPB10402 DPA10401-DPB10501 DPA10401-DPB110501 DPA10401-DPB14901
KEPPFLWEGYELTPDKWTVQ

SEQ ID NO: 7279 - protein, 20 aa, synthetic construct
  source 1..20: note = Seed: KEPPFLWMGYELHPDKWTVQ; note = HLAs: DRB1_0101 DRB1_1001 DPA10103-DPB10101 DPA10103-DPB10201 DPA10103-DPB10202 DPA10103-DPB10401 DPA10103-DPB10402 DPA10103-DPB110501 DPA10103-DPB112601 DPA10103-DPB11501 DPA10103-DPB11601 DPA10103-DPB11801 DPA10103-DPB11901 DPA10103-DPB12301 DPA10103-DPB13401 DPA10103-DPB13901 DPA10103-DPB14001 DPA10103-DPB14101 DPA10103-DPB14801 DPA10103-DPB14901 DPA10103-DPB15001 DPA10103-DPB15101 DPA10103-DPB15501 DPA10103-DPB15901 DPA10103-DPB18001 DPA10104-DPB10101 DPA10104-DPB11501 DPA10105-DPB10101 DPA10105-DPB10401 DPA10105-DPB11801 DPA10105-DPB15001 DPA10106-DPB10101 DPA10201-DPB10101 DPA10201-DPB10201 DPA10201-DPB10202 DPA10201-DPB10401 DPA10201-DPB10501 DPA10201-DPB110601 DPA10201-DPB11501 DPA10201-DPB11601 DPA10201-DPB11901 DPA10201-DPB13401 DPA10201-DPB15501 DPA10202-DPB10101 DPA10202-DPB10201 DPA10202-DPB10202 DPA10202-DPB10501 DPA10202-DPB110601 DPA10202-DPB11101 DPA10202-DPB11301 DPA10202-DPB11801 DPA10202-DPB11901 DPA10202-DPB13101 DPA10202-DPB13801 DPA10202-DPB15501; note = HLAs: DPA10202-DPB16501 DPA10301-DPB10101 DPA10301-DPB10201 DPA10301-DPB10202 DPA10301-DPB10401 DPA10301-DPB10402 DPA10301-DPB110501 DPA10301-DPB110601 DPA10301-DPB11101 DPA10301-DPB11301 DPA10301-DPB11801 DPA10301-DPB12301 DPA10301-DPB13901 DPA10301-DPB14001 DPA10301-DPB14901 DPA10301-DPB15501 DPA10301-DPB16501 DPA10301-DPB17501 DPA10301-DPB18001 DPA10401-DPB10101 DPA10401-DPB10201 DPA10401-DPB10202 DPA10401-DPB10402 DPA10401-DPB10501 DPA10401-DPB110501 DPA10401-DPB14901
KEPPYLWAGIELLPDKWTVQ

SEQ ID NO: 7280 - protein, 20 aa, synthetic construct
  source 1..20: note = Seed: KEPPFLWMGYELHPDKWTVQ; note = HLAs: DRB1_0101 DRB1_0405 DRB1_1001 DPA10103-DPB10101 DPA10103-DPB10201 DPA10103-DPB10202 DPA10103-DPB10401 DPA10103-DPB10402 DPA10103-DPB10501 DPA10103-DPB110501 DPA10103-DPB112601 DPA10103-DPB11501 DPA10103-DPB11601 DPA10103-DPB11801 DPA10103-DPB11901 DPA10103-DPB12301 DPA10103-DPB13101 DPA10103-DPB13401 DPA10103-DPB13901 DPA10103-DPB14001 DPA10103-DPB14101 DPA10103-DPB14801 DPA10103-DPB14901 DPA10103-DPB15001 DPA10103-DPB15101 DPA10103-DPB15501 DPA10103-DPB15901 DPA10103-DPB18001 DPA10104-DPB10101 DPA10104-DPB11501 DPA10105-DPB10101 DPA10105-DPB10401 DPA10105-DPB11801 DPA10105-DPB15001 DPA10106-DPB10101 DPA10201-DPB10101 DPA10201-DPB10201 DPA10201-DPB10202 DPA10201-DPB10401 DPA10201-DPB10501 DPA10201-DPB110601 DPA10201-DPB11501 DPA10201-DPB11601 DPA10201-DPB11901 DPA10201-DPB13401 DPA10201-DPB15501 DPA10202-DPB10101 DPA10202-DPB10201 DPA10202-DPB10202 DPA10202-DPB10401 DPA10202-DPB10501 DPA10202-DPB110601 DPA10202-DPB11301 DPA10202-DPB11801 DPA10202-DPB11901 DPA10202-DPB13101; note = HLAs: DPA10202-DPB13801 DPA10202-DPB15501 DPA10202-DPB16501 DPA10301-DPB10101 DPA10301-DPB10201 DPA10301-DPB10202 DPA10301-DPB10401 DPA10301-DPB10402 DPA10301-DPB110501 DPA10301-DPB110601 DPA10301-DPB11101 DPA10301-DPB11301 DPA10301-DPB11801 DPA10301-DPB12301 DPA10301-DPB13901 DPA10301-DPB14001 DPA10301-DPB14901 DPA10301-DPB15501 DPA10301-DPB16501 DPA10301-DPB17501 DPA10301-DPB18001 DPA10401-DPB10101 DPA10401-DPB10201 DPA10401-DPB10202 DPA10401-DPB10402 DPA10401-DPB10501 DPA10401-DPB110501 DPA10401-DPB14901
KEPPFLWSGIELAPDKWTVQ

SEQ ID NO: 7281 - protein, 20 aa, synthetic construct
  source 1..20: note = Seed: KEPPFLWMGYELHPDKWTVQ; note = HLAs: DRB1_1001 DPA10103-DPB10101 DPA10103-DPB10201 DPA10103-DPB10202 DPA10103-DPB10401 DPA10103-DPB10402 DPA10103-DPB10501 DPA10103-DPB110501 DPA10103-DPB112601 DPA10103-DPB11501 DPA10103-DPB11601 DPA10103-DPB11801 DPA10103-DPB11901 DPA10103-DPB12301 DPA10103-DPB13101 DPA10103-DPB13401 DPA10103-DPB13901 DPA10103-DPB14001 DPA10103-DPB14101 DPA10103-DPB14801 DPA10103-DPB14901 DPA10103-DPB15001 DPA10103-DPB15101 DPA10103-DPB15501 DPA10103-DPB15901 DPA10103-DPB18001 DPA10104-DPB10101 DPA10104-DPB11501 DPA10105-DPB10101 DPA10105-DPB10401 DPA10105-DPB11801 DPA10105-DPB15001 DPA10106-DPB10101 DPA10201-DPB10101 DPA10201-DPB10201 DPA10201-DPB10202 DPA10201-DPB10401 DPA10201-DPB10501 DPA10201-DPB110601 DPA10201-DPB11501 DPA10201-DPB11601 DPA10201-DPB11901 DPA10201-DPB13401 DPA10201-DPB15501 DPA10202-DPB10101 DPA10202-DPB10201 DPA10202-DPB10202 DPA10202-DPB10401 DPA10202-DPB10501 DPA10202-DPB110601 DPA10202-DPB11101 DPA10202-DPB11301 DPA10202-DPB11801 DPA10202-DPB11901 DPA10202-DPB13101; note = HLAs: DPA10202-DPB13801 DPA10202-DPB15501 DPA10202-DPB16501 DPA10301-DPB10101 DPA10301-DPB10201 DPA10301-DPB10202 DPA10301-DPB10401 DPA10301-DPB10402 DPA10301-DPB110501 DPA10301-DPB110601 DPA10301-DPB11101 DPA10301-DPB11301 DPA10301-DPB11801 DPA10301-DPB12301 DPA10301-DPB13901 DPA10301-DPB14001 DPA10301-DPB14901 DPA10301-DPB15501 DPA10301-DPB16501 DPA10301-DPB17501 DPA10301-DPB18001 DPA10401-DPB10101 DPA10401-DPB10201 DPA10401-DPB10202 DPA10401-DPB10402 DPA10401-DPB10501 DPA10401-DPB110501 DPA10401-DPB14901
KEPPFLWFGFELDPDKWTVQ

SEQ ID NO: 7282 - protein, 20 aa, synthetic construct
  source 1..20: note = Seed: KEPPFLWMGYELHPDKWTVQ; note = HLAs: DRB1_0101 DPA10103-DPB10101 DPA10103-DPB10201 DPA10103-DPB10202 DPA10103-DPB10401 DPA10103-DPB10402 DPA10103-DPB10501 DPA10103-DPB110501 DPA10103-DPB112601 DPA10103-DPB11501 DPA10103-DPB11601 DPA10103-DPB11801 DPA10103-DPB11901 DPA10103-DPB12301 DPA10103-DPB13101 DPA10103-DPB13401 DPA10103-DPB13901 DPA10103-DPB14001 DPA10103-DPB14101 DPA10103-DPB14801 DPA10103-DPB14901 DPA10103-DPB15001 DPA10103-DPB15101 DPA10103-DPB15501 DPA10103-DPB15901 DPA10103-DPB18001 DPA10104-DPB10101 DPA10104-DPB11501 DPA10105-DPB10101 DPA10105-DPB10401 DPA10105-DPB11801 DPA10105-DPB15001 DPA10106-DPB10101 DPA10201-DPB10101 DPA10201-DPB10201 DPA10201-DPB10202 DPA10201-DPB10401 DPA10201-DPB10501 DPA10201-DPB110601 DPA10201-DPB11501 DPA10201-DPB11601 DPA10201-DPB11901 DPA10201-DPB13401 DPA10201-DPB15501 DPA10202-DPB10101 DPA10202-DPB10201 DPA10202-DPB10202 DPA10202-DPB10401 DPA10202-DPB10501 DPA10202-DPB110601 DPA10202-DPB11101 DPA10202-DPB11301 DPA10202-DPB11801 DPA10202-DPB11901 DPA10202-DPB13101; note = HLAs: DPA10202-DPB13801 DPA10202-DPB15501 DPA10202-DPB16501 DPA10301-DPB10101 DPA10301-DPB10201 DPA10301-DPB10202 DPA10301-DPB10401 DPA10301-DPB10402 DPA10301-DPB110501 DPA10301-DPB110601 DPA10301-DPB11101 DPA10301-DPB11301 DPA10301-DPB11801 DPA10301-DPB12301 DPA10301-DPB13901 DPA10301-DPB14001 DPA10301-DPB14901 DPA10301-DPB15501 DPA10301-DPB16501 DPA10301-DPB17501 DPA10301-DPB18001 DPA10401-DPB10101 DPA10401-DPB10201 DPA10401-DPB10202 DPA10401-DPB10402 DPA10401-DPB10501 DPA10401-DPB110501 DPA10401-DPB14901
KEPPFLWQGWELMPDKWTVQ

SEQ ID NO: 7283 - protein, 14 aa, synthetic construct
  source 1..14: note = Seed: PPFLWMGYELHPDK; note = HLAs: DPA10103-DPB10101 DPA10103-DPB10201 DPA10103-DPB10202 DPA10103-DPB10401 DPA10103-DPB112601 DPA10103-DPB11501 DPA10103-DPB11601 DPA10103-DPB11901 DPA10103-DPB12301 DPA10103-DPB13101 DPA10103-DPB13401 DPA10103-DPB13901 DPA10103-DPB14001 DPA10103-DPB14101 DPA10103-DPB14801 DPA10103-DPB15001 DPA10103-DPB15901 DPA10104-DPB10101 DPA10104-DPB11501 DPA10105-DPB10101 DPA10105-DPB10401 DPA10105-DPB15001 DPA10106-DPB10101 DPA10201-DPB10101 DPA10201-DPB110601 DPA10201-DPB11501 DPA10201-DPB11601 DPA10201-DPB11901 DPA10202-DPB10101 DPA10202-DPB10201 DPA10202-DPB10202 DPA10202-DPB110601 DPA10202-DPB11901 DPA10202-DPB13101 DPA10202-DPB16501 DPA10301-DPB10101 DPA10301-DPB10201 DPA10301-DPB10202 DPA10301-DPB10401 DPA10301-DPB10402 DPA10301-DPB110501 DPA10301-DPB110601 DPA10301-DPB11801 DPA10301-DPB12301 DPA10301-DPB13901 DPA10301-DPB14001 DPA10301-DPB14901 DPA10301-DPB15501 DPA10301-DPB16501 DPA10301-DPB17501 DPA10301-DPB18001 DPA10401-DPB10101 DPA10401-DPB10201 DPA10401-DPB10202; note = HLAs: DPA10401-DPB10402 DPA10401-DPB10501 DPA10401-DPB110501 DPA10401-DPB14901
PPFLWWGFELNPDK

SEQ ID NO: 7284 - protein, 20 aa, synthetic construct
  source 1..20: note = Seed: KEPPFLWMGYELHPDKWTVQ; note = HLAs: DRB1_0101 DRB1_0405 DRB1_1001 DPA10103-DPB10201 DPA10103-DPB10202 DPA10103-DPB10402 DPA10103-DPB10501 DPA10103-DPB110501 DPA10103-DPB11501 DPA10103-DPB11601 DPA10103-DPB11801 DPA10103-DPB11901 DPA10103-DPB13401 DPA10103-DPB14001 DPA10103-DPB14101 DPA10103-DPB14801 DPA10103-DPB14901 DPA10103-DPB15101 DPA10103-DPB15501 DPA10103-DPB15901 DPA10103-DPB18001 DPA10104-DPB11501 DPA10105-DPB11801 DPA10106-DPB10101 DPA10201-DPB10101 DPA10201-DPB10201 DPA10201-DPB10202 DPA10201-DPB10401 DPA10201-DPB10501 DPA10201-DPB110601 DPA10201-DPB11501 DPA10201-DPB11601 DPA10201-DPB11901 DPA10201-DPB13401 DPA10201-DPB15501 DPA10202-DPB10101 DPA10202-DPB10201 DPA10202-DPB10202 DPA10202-DPB10401 DPA10202-DPB10501 DPA10202-DPB110601 DPA10202-DPB11101 DPA10202-DPB11301 DPA10202-DPB11801 DPA10202-DPB11901 DPA10202-DPB13101 DPA10202-DPB13801 DPA10202-DPB15501 DPA10202-DPB16501 DPA10301-DPB10201 DPA10301-DPB10202 DPA10301-DPB10401 DPA10301-DPB110601 DPA10301-DPB11101 DPA10301-DPB11301 DPA10301-DPB11801; note = HLAs: DPA10301-DPB12301 DPA10301-DPB13901 DPA10301-DPB14001 DPA10301-DPB15501 DPA10401-DPB10201 DPA10401-DPB10202 DPA10401-DPB10402 DPA10401-DPB110501 DPA10401-DPB14901
KEPPFLWYGAELLPDKWTVQ

SEQ ID NO: 7285 - protein, 20 aa, synthetic construct
  source 1..20: note = Seed: KEPPFLWMGYELHPDKWTVQ; note = HLAs: DPA10103-DPB10101 DPA10103-DPB10201 DPA10103-DPB10202 DPA10103-DPB10401 DPA10103-DPB10402 DPA10103-DPB10501 DPA10103-DPB110501 DPA10103-DPB112601 DPA10103-DPB11501 DPA10103-DPB11601 DPA10103-DPB11801 DPA10103-DPB11901 DPA10103-DPB12301 DPA10103-DPB13101 DPA10103-DPB13401 DPA10103-DPB13901 DPA10103-DPB14001 DPA10103-DPB14101 DPA10103-DPB14801 DPA10103-DPB14901 DPA10103-DPB15001 DPA10103-DPB15101 DPA10103-DPB15501 DPA10103-DPB15901 DPA10103-DPB18001 DPA10104-DPB10101 DPA10104-DPB11501 DPA10105-DPB10101 DPA10105-DPB10401 DPA10105-DPB11801 DPA10105-DPB15001 DPA10106-DPB10101 DPA10201-DPB10101 DPA10201-DPB10201 DPA10201-DPB10202 DPA10201-DPB10401 DPA10201-DPB10501 DPA10201-DPB110601 DPA10201-DPB11501 DPA10201-DPB11601 DPA10201-DPB11901 DPA10201-DPB13401 DPA10201-DPB15501 DPA10202-DPB10101 DPA10202-DPB10201 DPA10202-DPB10202 DPA10202-DPB10401 DPA10202-DPB10501 DPA10202-DPB110601 DPA10202-DPB11101 DPA10202-DPB11301 DPA10202-DPB11801 DPA10202-DPB11901 DPA10202-DPB13101 DPA10202-DPB13801; note = HLAs: DPA10202-DPB15501 DPA10202-DPB16501 DPA10301-DPB10101 DPA10301-DPB10201 DPA10301-DPB10202 DPA10301-DPB10401 DPA10301-DPB10402 DPA10301-DPB110501 DPA10301-DPB110601 DPA10301-DPB11101 DPA10301-DPB11301 DPA10301-DPB11801 DPA10301-DPB12301 DPA10301-DPB13901 DPA10301-DPB14001 DPA10301-DPB14901 DPA10301-DPB15501 DPA10301-DPB16501 DPA10301-DPB17501 DPA10301-DPB18001 DPA10401-DPB10101 DPA10401-DPB10201 DPA10401-DPB10202 DPA10401-DPB10402 DPA10401-DPB10501 DPA10401-DPB110501 DPA10401-DPB14901
KEPPCLWIGFELVPDKWTVQ

SEQ ID NO: 7286 - protein, 20 aa, synthetic construct
  source 1..20: note = Seed: KEPPFLWMGYELHPDKWTVQ; note = HLAs: DPA10103-DPB10101 DPA10103-DPB10201 DPA10103-DPB10202 DPA10103-DPB10401 DPA10103-DPB10402 DPA10103-DPB10501 DPA10103-DPB110501 DPA10103-DPB112601 DPA10103-DPB11501 DPA10103-DPB11601 DPA10103-DPB11801 DPA10103-DPB11901 DPA10103-DPB12301 DPA10103-DPB13101 DPA10103-DPB13401 DPA10103-DPB13901 DPA10103-DPB14001 DPA10103-DPB14101 DPA10103-DPB14801 DPA10103-DPB14901 DPA10103-DPB15001 DPA10103-DPB15101 DPA10103-DPB15501 DPA10103-DPB15901 DPA10103-DPB18001 DPA10104-DPB10101 DPA10104-DPB11501 DPA10105-DPB10101 DPA10105-DPB10401 DPA10105-DPB11801 DPA10105-DPB15001 DPA10106-DPB10101 DPA10201-DPB10101 DPA10201-DPB10201 DPA10201-DPB10202 DPA10201-DPB10401 DPA10201-DPB10501 DPA10201-DPB110601 DPA10201-DPB11501 DPA10201-DPB11601 DPA10201-DPB11901 DPA10201-DPB13401 DPA10201-DPB15501 DPA10202-DPB10101 DPA10202-DPB10201 DPA10202-DPB10202 DPA10202-DPB10401 DPA10202-DPB10501 DPA10202-DPB110601 DPA10202-DPB11101 DPA10202-DPB11301 DPA10202-DPB11801 DPA10202-DPB11901 DPA10202-DPB13101 DPA10202-DPB13801; note = HLAs: DPA10202-DPB15501 DPA10202-DPB16501 DPA10301-DPB10101 DPA10301-DPB10201 DPA10301-DPB10202 DPA10301-DPB10401 DPA10301-DPB10402 DPA10301-DPB110501 DPA10301-DPB110601 DPA10301-DPB11101 DPA10301-DPB11301 DPA10301-DPB11801 DPA10301-DPB12301 DPA10301-DPB13901 DPA10301-DPB14001 DPA10301-DPB14901 DPA10301-DPB15501 DPA10301-DPB16501 DPA10301-DPB17501 DPA10301-DPB18001 DPA10401-DPB10101 DPA10401-DPB10201 DPA10401-DPB10202 DPA10401-DPB10402 DPA10401-DPB10501 DPA10401-DPB110501 DPA10401-DPB14901
KEPPILWVGFELEPDKWTVQ

SEQ ID NO: 7287 - protein, 20 aa, synthetic construct
  source 1..20: note = Seed: KEPPFLWMGYELHPDKWTVQ; note = HLAs: DPA10103-DPB10101 DPA10103-DPB10201 DPA10103-DPB10202 DPA10103-DPB10401 DPA10103-DPB10402 DPA10103-DPB10501 DPA10103-DPB110501 DPA10103-DPB112601 DPA10103-DPB11501 DPA10103-DPB11601 DPA10103-DPB11801 DPA10103-DPB11901 DPA10103-DPB12301 DPA10103-DPB13101 DPA10103-DPB13401 DPA10103-DPB13901 DPA10103-DPB14001 DPA10103-DPB14101 DPA10103-DPB14801 DPA10103-DPB14901 DPA10103-DPB15001 DPA10103-DPB15101 DPA10103-DPB15501 DPA10103-DPB15901 DPA10103-DPB18001 DPA10104-DPB10101 DPA10104-DPB11501 DPA10105-DPB10101 DPA10105-DPB10401 DPA10105-DPB11801 DPA10105-DPB15001 DPA10106-DPB10101 DPA10201-DPB10101 DPA10201-DPB10201 DPA10201-DPB10202 DPA10201-DPB10401 DPA10201-DPB10501 DPA10201-DPB110601 DPA10201-DPB11501 DPA10201-DPB11601 DPA10201-DPB11901 DPA10201-DPB13401 DPA10201-DPB15501 DPA10202-DPB10101 DPA10202-DPB10201 DPA10202-DPB10202 DPA10202-DPB10401 DPA10202-DPB10501 DPA10202-DPB110601 DPA10202-DPB11101 DPA10202-DPB11301 DPA10202-DPB11801 DPA10202-DPB11901 DPA10202-DPB13101 DPA10202-DPB13801; note = HLAs: DPA10202-DPB15501 DPA10202-DPB16501 DPA10301-DPB10101 DPA10301-DPB10201 DPA10301-DPB10202 DPA10301-DPB10401 DPA10301-DPB10402 DPA10301-DPB110501 DPA10301-DPB110601 DPA10301-DPB11101 DPA10301-DPB11301 DPA10301-DPB11801 DPA10301-DPB12301 DPA10301-DPB13901 DPA10301-DPB14001 DPA10301-DPB14901 DPA10301-DPB15501 DPA10301-DPB16501 DPA10301-DPB17501 DPA10301-DPB18001 DPA10401-DPB10101 DPA10401-DPB10201 DPA10401-DPB10202 DPA10401-DPB10402 DPA10401-DPB10501 DPA10401-DPB110501 DPA10401-DPB14901
KEPPLLWSGLELVPDKWTVQ

SEQ ID NO: 7288 - protein, 20 aa, synthetic construct
  source 1..20: note = Seed: KEPPFLWMGYELHPDKWTVQ; note = HLAs: DRB1_0101 DRB1_0405 DRB1_1001 DPA10103-DPB10101 DPA10103-DPB10201 DPA10103-DPB10202 DPA10103-DPB10401 DPA10103-DPB10402 DPA10103-DPB10501 DPA10103-DPB110501 DPA10103-DPB112601 DPA10103-DPB11501 DPA10103-DPB11601 DPA10103-DPB11801 DPA10103-DPB11901 DPA10103-DPB12301 DPA10103-DPB13101 DPA10103-DPB13401 DPA10103-DPB13901 DPA10103-DPB14001 DPA10103-DPB14101 DPA10103-DPB14801 DPA10103-DPB14901 DPA10103-DPB15001 DPA10103-DPB15101 DPA10103-DPB15501 DPA10103-DPB15901 DPA10103-DPB18001 DPA10104-DPB10101 DPA10104-DPB11501 DPA10105-DPB10101 DPA10105-DPB10401 DPA10105-DPB11801 DPA10105-DPB15001 DPA10106-DPB10101 DPA10201-DPB10101 DPA10201-DPB10201 DPA10201-DPB10202 DPA10201-DPB10401 DPA10201-DPB10501 DPA10201-DPB110601 DPA10201-DPB11501 DPA10201-DPB11601 DPA10201-DPB11901 DPA10201-DPB13401 DPA10201-DPB15501 DPA10202-DPB10101 DPA10202-DPB10201 DPA10202-DPB10202 DPA10202-DPB10401 DPA10202-DPB10501 DPA10202-DPB110601 DPA10202-DPB11101 DPA10202-DPB11301 DPA10202-DPB11801 DPA10202-DPB11901; note = HLAs: DPA10202-DPB13101 DPA10202-DPB13801 DPA10202-DPB15501 DPA10202-DPB16501 DPA10301-DPB10101 DPA10301-DPB10201 DPA10301-DPB10202 DPA10301-DPB10401 DPA10301-DPB10402 DPA10301-DPB110501 DPA10301-DPB110601 DPA10301-DPB11101 DPA10301-DPB11301 DPA10301-DPB11801 DPA10301-DPB12301 DPA10301-DPB13901 DPA10301-DPB14001 DPA10301-DPB14901 DPA10301-DPB15501 DPA10301-DPB16501 DPA10301-DPB17501 DPA10301-DPB18001 DPA10401-DPB10101 DPA10401-DPB10201 DPA10401-DPB10202 DPA10401-DPB10402 DPA10401-DPB10501 DPA10401-DPB110501 DPA10401-DPB14901
KEPPFLWEGVELIPDKWTVQ

SEQ ID NO: 7289 - protein, 20 aa, synthetic construct
  source 1..20: note = Seed: KEPPFLWMGYELHPDKWTVQ; note = HLAs: DRB1_0101 DRB1_0405 DRB1_1001 DPA10103-DPB10101 DPA10103-DPB10201 DPA10103-DPB10202 DPA10103-DPB10401 DPA10103-DPB10402 DPA10103-DPB10501 DPA10103-DPB110501 DPA10103-DPB112601 DPA10103-DPB11501 DPA10103-DPB11601 DPA10103-DPB11801 DPA10103-DPB11901 DPA10103-DPB12301 DPA10103-DPB13101 DPA10103-DPB13401 DPA10103-DPB13901 DPA10103-DPB14001 DPA10103-DPB14101 DPA10103-DPB14801 DPA10103-DPB14901 DPA10103-DPB15001 DPA10103-DPB15101 DPA10103-DPB15501 DPA10103-DPB15901 DPA10103-DPB18001 DPA10104-DPB10101 DPA10104-DPB11501 DPA10105-DPB10101 DPA10105-DPB10401 DPA10105-DPB11801 DPA10105-DPB15001 DPA10106-DPB10101 DPA10201-DPB10101 DPA10201-DPB10201 DPA10201-DPB10202 DPA10201-DPB10401 DPA10201-DPB10501 DPA10201-DPB110601 DPA10201-DPB11501 DPA10201-DPB11601 DPA10201-DPB11901 DPA10201-DPB13401 DPA10201-DPB15501 DPA10202-DPB10101 DPA10202-DPB10201 DPA10202-DPB10202 DPA10202-DPB10401 DPA10202-DPB10501 DPA10202-DPB110601 DPA10202-DPB11101 DPA10202-DPB11301 DPA10202-DPB11801 DPA10202-DPB11901; note = HLAs: DPA10202-DPB13101 DPA10202-DPB13801 DPA10202-DPB15501 DPA10202-DPB16501 DPA10301-DPB10101 DPA10301-DPB10201 DPA10301-DPB10202 DPA10301-DPB10401 DPA10301-DPB10402 DPA10301-DPB110501 DPA10301-DPB110601 DPA10301-DPB11101 DPA10301-DPB11301 DPA10301-DPB11801 DPA10301-DPB12301 DPA10301-DPB13901 DPA10301-DPB14001 DPA10301-DPB14901 DPA10301-DPB15501 DPA10301-DPB16501 DPA10301-DPB17501 DPA10301-DPB18001 DPA10401-DPB10101 DPA10401-DPB10201 DPA10401-DPB10202 DPA10401-DPB10402 DPA10401-DPB10501 DPA10401-DPB110501 DPA10401-DPB14901
KEPPFLWAGVELIPDKWTVQ

SEQ ID NO: 7290 - protein, 20 aa, synthetic construct
  source 1..20: note = Seed: KEPPFLWMGYELHPDKWTVQ; note = HLAs: DRB1_0101 DRB1_0405 DRB1_1001 DPA10103-DPB10401 DPA10103-DPB112601 DPA10103-DPB11501 DPA10103-DPB11801 DPA10103-DPB12301 DPA10103-DPB13401 DPA10103-DPB13901 DPA10103-DPB14001 DPA10104-DPB11501 DPA10105-DPB10401 DPA10105-DPB11801 DPA10106-DPB10101 DPA10201-DPB10101 DPA10201-DPB10201 DPA10201-DPB10202 DPA10201-DPB10401 DPA10201-DPB10501 DPA10201-DPB11501 DPA10202-DPB10101 DPA10202-DPB10202 DPA10202-DPB10401 DPA10202-DPB10501 DPA10202-DPB11801 DPA10202-DPB13101 DPA10202-DPB13801 DPA10202-DPB16501 DPA10301-DPB10401 DPA10301-DPB10402 DPA10301-DPB110501 DPA10301-DPB11801 DPA10301-DPB12301 DPA10301-DPB13901 DPA10301-DPB14001 DPA10301-DPB14901 DPA10301-DPB17501 DPA10301-DPB18001 DPA10401-DPB10402 DPA10401-DPB110501 DPA10401-DPB14901
KEPPFLWVGHELLPDKWTVQ

SEQ ID NO: 7291 - protein, 20 aa, synthetic construct
  source 1..20: note = Seed: KEPPFLWMGYELHPDKWTVQ; note = HLAs: DRB1_0101 DRB1_0405 DRB1_1001 DPA10103-DPB10101 DPA10103-DPB10201 DPA10103-DPB10202 DPA10103-DPB10401 DPA10103-DPB10402 DPA10103-DPB10501 DPA10103-DPB110501 DPA10103-DPB112601 DPA10103-DPB11501 DPA10103-DPB11601 DPA10103-DPB11801 DPA10103-DPB11901 DPA10103-DPB12301 DPA10103-DPB13101 DPA10103-DPB13401 DPA10103-DPB13901 DPA10103-DPB14001 DPA10103-DPB14101 DPA10103-DPB14801 DPA10103-DPB14901 DPA10103-DPB15001 DPA10103-DPB15101 DPA10103-DPB15501 DPA10103-DPB15901 DPA10103-DPB18001 DPA10104-DPB10101 DPA10104-DPB11501 DPA10105-DPB10101 DPA10105-DPB10401 DPA10105-DPB11801 DPA10105-DPB15001 DPA10106-DPB10101 DPA10201-DPB10101 DPA10201-DPB10201 DPA10201-DPB10202 DPA10201-DPB10401 DPA10201-DPB10501 DPA10201-DPB110601 DPA10201-DPB11501 DPA10201-DPB11601 DPA10201-DPB11901 DPA10201-DPB13401 DPA10201-DPB15501 DPA10202-DPB10101 DPA10202-DPB10201 DPA10202-DPB10202 DPA10202-DPB10401 DPA10202-DPB10501 DPA10202-DPB110601 DPA10202-DPB11101 DPA10202-DPB11301 DPA10202-DPB11801 DPA10202-DPB11901; note = HLAs: DPA10202-DPB13101 DPA10202-DPB13801 DPA10202-DPB15501 DPA10202-DPB16501 DPA10301-DPB10101 DPA10301-DPB10201 DPA10301-DPB10202 DPA10301-DPB10401 DPA10301-DPB10402 DPA10301-DPB110501 DPA10301-DPB110601 DPA10301-DPB11101 DPA10301-DPB11301 DPA10301-DPB11801 DPA10301-DPB12301 DPA10301-DPB13901 DPA10301-DPB14001 DPA10301-DPB14901 DPA10301-DPB15501 DPA10301-DPB16501 DPA10301-DPB17501 DPA10301-DPB18001 DPA10401-DPB10101 DPA10401-DPB10201 DPA10401-DPB10202 DPA10401-DPB10402 DPA10401-DPB10501 DPA10401-DPB110501 DPA10401-DPB14901
KEPPFLWTGIELSPDKWTVQ

SEQ ID NO: 7292 - protein, 20 aa, synthetic construct
  source 1..20: note = Seed: KEPPFLWMGYELHPDKWTVQ; note = HLAs: DPA10103-DPB10101 DPA10103-DPB10201 DPA10103-DPB10202 DPA10103-DPB10401 DPA10103-DPB10402 DPA10103-DPB10501 DPA10103-DPB110501 DPA10103-DPB112601 DPA10103-DPB11601 DPA10103-DPB11901 DPA10103-DPB12301 DPA10103-DPB13101 DPA10103-DPB13401 DPA10103-DPB13901 DPA10103-DPB14001 DPA10103-DPB14101 DPA10103-DPB14801 DPA10103-DPB14901 DPA10103-DPB15001 DPA10103-DPB15101 DPA10103-DPB15501 DPA10103-DPB15901 DPA10103-DPB18001 DPA10104-DPB10101 DPA10105-DPB10101 DPA10105-DPB10401 DPA10105-DPB15001 DPA10106-DPB10101 DPA10201-DPB10101 DPA10201-DPB10201 DPA10201-DPB10202 DPA10201-DPB10401 DPA10201-DPB10501 DPA10201-DPB110601 DPA10201-DPB11501 DPA10201-DPB11601 DPA10201-DPB11901 DPA10201-DPB13401 DPA10201-DPB15501 DPA10202-DPB10101 DPA10202-DPB10201 DPA10202-DPB10202 DPA10202-DPB10401 DPA10202-DPB10501 DPA10202-DPB110601 DPA10202-DPB11101 DPA10202-DPB11301 DPA10202-DPB11801 DPA10202-DPB11901 DPA10202-DPB13101 DPA10202-DPB13801 DPA10202-DPB15501 DPA10202-DPB16501 DPA10301-DPB10101 DPA10301-DPB10201; note = HLAs: DPA10301-DPB10202 DPA10301-DPB10402 DPA10301-DPB110501 DPA10301-DPB110601 DPA10301-DPB11101 DPA10301-DPB11301 DPA10301-DPB14901 DPA10301-DPB15501 DPA10301-DPB16501 DPA10301-DPB17501 DPA10301-DPB18001 DPA10401-DPB10101 DPA10401-DPB10201 DPA10401-DPB10202 DPA10401-DPB10402 DPA10401-DPB10501 DPA10401-DPB110501 DPA10401-DPB14901
KEPPRLWIGFELIPDKWTVQ

SEQ ID NO: 7293 - protein, 20 aa, synthetic construct
  source 1..20: note = Seed: KEPPFLWMGYELHPDKWTVQ; note = HLAs: DPA10103-DPB10101 DPA10103-DPB10201 DPA10103-DPB10202 DPA10103-DPB10401 DPA10103-DPB10402 DPA10103-DPB10501 DPA10103-DPB110501 DPA10103-DPB112601 DPA10103-DPB11501 DPA10103-DPB11601 DPA10103-DPB11801 DPA10103-DPB11901 DPA10103-DPB12301 DPA10103-DPB13101 DPA10103-DPB13401 DPA10103-DPB13901 DPA10103-DPB14001 DPA10103-DPB14101 DPA10103-DPB14801 DPA10103-DPB14901 DPA10103-DPB15001 DPA10103-DPB15101 DPA10103-DPB15501 DPA10103-DPB15901 DPA10103-DPB18001 DPA10104-DPB10101 DPA10104-DPB11501 DPA10105-DPB10101 DPA10105-DPB10401 DPA10105-DPB11801 DPA10105-DPB15001 DPA10106-DPB10101 DPA10201-DPB10101 DPA10201-DPB10201 DPA10201-DPB10202 DPA10201-DPB10401 DPA10201-DPB10501 DPA10201-DPB110601 DPA10201-DPB11501 DPA10201-DPB11601 DPA10201-DPB11901 DPA10201-DPB13401 DPA10201-DPB15501 DPA10202-DPB10201 DPA10202-DPB10202 DPA10202-DPB10401 DPA10202-DPB10501 DPA10202-DPB110601 DPA10202-DPB11101 DPA10202-DPB11301 DPA10202-DPB11801 DPA10202-DPB11901 DPA10202-DPB13101 DPA10202-DPB13801 DPA10202-DPB15501; note = HLAs: DPA10202-DPB16501 DPA10301-DPB10101 DPA10301-DPB10201 DPA10301-DPB10202 DPA10301-DPB10401 DPA10301-DPB10402 DPA10301-DPB110501 DPA10301-DPB110601 DPA10301-DPB11301 DPA10301-DPB11801 DPA10301-DPB12301 DPA10301-DPB13901 DPA10301-DPB14001 DPA10301-DPB14901 DPA10301-DPB15501 DPA10301-DPB16501 DPA10301-DPB17501 DPA10301-DPB18001 DPA10401-DPB10101 DPA10401-DPB10201 DPA10401-DPB10202 DPA10401-DPB10402 DPA10401-DPB10501 DPA10401-DPB110501 DPA10401-DPB14901
KEPPFLWYGFELEPDKWTVQ

SEQ ID NO: 7294 - protein, 20 aa, synthetic construct
  source 1..20: note = Seed: KEPPFLWMGYELHPDKWTVQ; note = HLAs: DPA10103-DPB10101 DPA10103-DPB10201 DPA10103-DPB10202 DPA10103-DPB10401 DPA10103-DPB10402 DPA10103-DPB10501 DPA10103-DPB110501 DPA10103-DPB112601 DPA10103-DPB11501 DPA10103-DPB11601 DPA10103-DPB11801 DPA10103-DPB11901 DPA10103-DPB12301 DPA10103-DPB13101 DPA10103-DPB13401 DPA10103-DPB13901 DPA10103-DPB14001 DPA10103-DPB14101 DPA10103-DPB14801 DPA10103-DPB14901 DPA10103-DPB15001 DPA10103-DPB15101 DPA10103-DPB15501 DPA10103-DPB15901 DPA10103-DPB18001 DPA10104-DPB10101 DPA10104-DPB11501 DPA10105-DPB10101 DPA10105-DPB10401 DPA10105-DPB11801 DPA10105-DPB15001 DPA10106-DPB10101 DPA10201-DPB10101 DPA10201-DPB10201 DPA10201-DPB10202 DPA10201-DPB10401 DPA10201-DPB10501 DPA10201-DPB110601 DPA10201-DPB11501 DPA10201-DPB11601 DPA10201-DPB11901 DPA10201-DPB13401 DPA10201-DPB15501 DPA10202-DPB10101 DPA10202-DPB10201 DPA10202-DPB10202 DPA10202-DPB10401 DPA10202-DPB10501 DPA10202-DPB110601 DPA10202-DPB11101 DPA10202-DPB11301 DPA10202-DPB11801 DPA10202-DPB11901 DPA10202-DPB13101 DPA10202-DPB13801; note = HLAs: DPA10202-DPB15501 DPA10202-DPB16501 DPA10301-DPB10101 DPA10301-DPB10201 DPA10301-DPB10202 DPA10301-DPB10401 DPA10301-DPB10402 DPA10301-DPB110501 DPA10301-DPB110601 DPA10301-DPB11101 DPA10301-DPB11301 DPA10301-DPB11801 DPA10301-DPB12301 DPA10301-DPB13901 DPA10301-DPB14001 DPA10301-DPB14901 DPA10301-DPB15501 DPA10301-DPB16501 DPA10301-DPB17501 DPA10301-DPB18001 DPA10401-DPB10101 DPA10401-DPB10201 DPA10401-DPB10202 DPA10401-DPB10402 DPA10401-DPB10501 DPA10401-DPB110501 DPA10401-DPB14901
KEPPYLWTGFELRPDKWTVQ

SEQ ID NO: 7295 - protein, 20 aa, synthetic construct
  source 1..20: note = Seed: KEPPFLWMGYELHPDKWTVQ; note = HLAs: DPA10103-DPB10101 DPA10103-DPB10201 DPA10103-DPB10202 DPA10103-DPB10401 DPA10103-DPB10402 DPA10103-DPB10501 DPA10103-DPB110501 DPA10103-DPB112601 DPA10103-DPB11501 DPA10103-DPB11601 DPA10103-DPB11801 DPA10103-DPB11901 DPA10103-DPB12301 DPA10103-DPB13101 DPA10103-DPB13401 DPA10103-DPB13901 DPA10103-DPB14001 DPA10103-DPB14101 DPA10103-DPB14801 DPA10103-DPB14901 DPA10103-DPB15001 DPA10103-DPB15101 DPA10103-DPB15501 DPA10103-DPB15901 DPA10103-DPB18001 DPA10104-DPB10101 DPA10104-DPB11501 DPA10105-DPB10101 DPA10105-DPB10401 DPA10105-DPB11801 DPA10105-DPB15001 DPA10106-DPB10101 DPA10201-DPB10101 DPA10201-DPB10201 DPA10201-DPB10202 DPA10201-DPB10401 DPA10201-DPB10501 DPA10201-DPB110601 DPA10201-DPB11501 DPA10201-DPB11601 DPA10201-DPB11901 DPA10201-DPB13401 DPA10201-DPB15501 DPA10202-DPB10101 DPA10202-DPB10201 DPA10202-DPB10202 DPA10202-DPB10401 DPA10202-DPB10501 DPA10202-DPB110601 DPA10202-DPB11101 DPA10202-DPB11301 DPA10202-DPB11801 DPA10202-DPB11901 DPA10202-DPB13101 DPA10202-DPB13801; note = HLAs: DPA10202-DPB15501 DPA10202-DPB16501 DPA10301-DPB10101 DPA10301-DPB10201 DPA10301-DPB10202 DPA10301-DPB10401 DPA10301-DPB10402 DPA10301-DPB110501 DPA10301-DPB110601 DPA10301-DPB11101 DPA10301-DPB11301 DPA10301-DPB11801 DPA10301-DPB12301 DPA10301-DPB13901 DPA10301-DPB14001 DPA10301-DPB14901 DPA10301-DPB15501 DPA10301-DPB16501 DPA10301-DPB17501 DPA10301-DPB18001 DPA10401-DPB10101 DPA10401-DPB10201 DPA10401-DPB10202 DPA10401-DPB10402 DPA10401-DPB10501 DPA10401-DPB110501 DPA10401-DPB14901
KEPPCLWVGFELVPDKWTVQ

SEQ ID NO: 7296 - protein, 20 aa, synthetic construct
  source 1..20: note = Seed: KEPPFLWMGYELHPDKWTVQ; note = HLAs: DRB1_0405 DRB1_1001 DPA10103-DPB10201 DPA10103-DPB10202 DPA10103-DPB10401 DPA10103-DPB10402 DPA10103-DPB10501 DPA10103-DPB110501 DPA10103-DPB112601 DPA10103-DPB11501 DPA10103-DPB11601 DPA10103-DPB11801 DPA10103-DPB11901 DPA10103-DPB12301 DPA10103-DPB13401 DPA10103-DPB13901 DPA10103-DPB14001 DPA10103-DPB14101 DPA10103-DPB14801 DPA10103-DPB14901 DPA10103-DPB15101 DPA10103-DPB15501 DPA10103-DPB15901 DPA10103-DPB18001 DPA10104-DPB11501 DPA10105-DPB10401 DPA10105-DPB11801 DPA10106-DPB10101 DPA10201-DPB10101 DPA10201-DPB10201 DPA10201-DPB10202 DPA10201-DPB10401 DPA10201-DPB10501 DPA10201-DPB110601 DPA10201-DPB11501 DPA10201-DPB11601 DPA10201-DPB11901 DPA10201-DPB13401 DPA10201-DPB15501 DPA10202-DPB10201 DPA10202-DPB10202 DPA10202-DPB10501 DPA10202-DPB110601 DPA10202-DPB11801 DPA10202-DPB11901 DPA10202-DPB13801 DPA10301-DPB10201 DPA10301-DPB10202 DPA10301-DPB10401 DPA10301-DPB10402 DPA10301-DPB110501 DPA10301-DPB110601 DPA10301-DPB11301 DPA10301-DPB11801 DPA10301-DPB12301; note = HLAs: DPA10301-DPB13901 DPA10301-DPB14001 DPA10301-DPB14901 DPA10301-DPB15501 DPA10301-DPB17501 DPA10301-DPB18001 DPA10401-DPB10201 DPA10401-DPB10202 DPA10401-DPB10402 DPA10401-DPB10501 DPA10401-DPB110501 DPA10401-DPB14901
KEPPFLWYGIELMPDKWTVQ

SEQ ID NO: 7297 - protein, 20 aa, synthetic construct
  source 1..20: note = Seed: KEPPFLWMGYELHPDKWTVQ; note = HLAs: DRB1_0101 DRB1_0405 DRB1_1001 DPA10103-DPB10101 DPA10103-DPB10201 DPA10103-DPB10202 DPA10103-DPB10401 DPA10103-DPB10402 DPA10103-DPB10501 DPA10103-DPB110501 DPA10103-DPB112601 DPA10103-DPB11501 DPA10103-DPB11601 DPA10103-DPB11801 DPA10103-DPB11901 DPA10103-DPB12301 DPA10103-DPB13101 DPA10103-DPB13401 DPA10103-DPB13901 DPA10103-DPB14001 DPA10103-DPB14101 DPA10103-DPB14801 DPA10103-DPB14901 DPA10103-DPB15001 DPA10103-DPB15101 DPA10103-DPB15501 DPA10103-DPB15901 DPA10103-DPB18001 DPA10104-DPB10101 DPA10104-DPB11501 DPA10105-DPB10101 DPA10105-DPB10401 DPA10105-DPB11801 DPA10105-DPB15001 DPA10106-DPB10101 DPA10201-DPB10101 DPA10201-DPB10201 DPA10201-DPB10202 DPA10201-DPB10401 DPA10201-DPB10501 DPA10201-DPB110601 DPA10201-DPB11501 DPA10201-DPB11601 DPA10201-DPB11901 DPA10201-DPB13401 DPA10201-DPB15501 DPA10202-DPB10101 DPA10202-DPB10201 DPA10202-DPB10202 DPA10202-DPB10401 DPA10202-DPB10501 DPA10202-DPB110601 DPA10202-DPB11101 DPA10202-DPB11301 DPA10202-DPB11801 DPA10202-DPB11901; note = HLAs: DPA10202-DPB13101 DPA10202-DPB13801 DPA10202-DPB15501 DPA10202-DPB16501 DPA10301-DPB10101 DPA10301-DPB10201 DPA10301-DPB10202 DPA10301-DPB10401 DPA10301-DPB10402 DPA10301-DPB110501 DPA10301-DPB110601 DPA10301-DPB11101 DPA10301-DPB11301 DPA10301-DPB11801 DPA10301-DPB12301 DPA10301-DPB13901 DPA10301-DPB14001 DPA10301-DPB14901 DPA10301-DPB15501 DPA10301-DPB16501 DPA10301-DPB17501 DPA10301-DPB18001 DPA10401-DPB10101 DPA10401-DPB10201 DPA10401-DPB10202 DPA10401-DPB10402 DPA10401-DPB10501 DPA10401-DPB110501 DPA10401-DPB14901
KEPPFLWTGVELMPDKWTVQ

SEQ ID NO: 7298 - protein, 20 aa, synthetic construct
  source 1..20: note = Seed: KEPPFLWMGYELHPDKWTVQ; note = HLAs: DPA10103-DPB10101 DPA10103-DPB10201 DPA10103-DPB10202 DPA10103-DPB10401 DPA10103-DPB10402 DPA10103-DPB10501 DPA10103-DPB110501 DPA10103-DPB112601 DPA10103-DPB11501 DPA10103-DPB11601 DPA10103-DPB11801 DPA10103-DPB11901 DPA10103-DPB12301 DPA10103-DPB13101 DPA10103-DPB13401 DPA10103-DPB13901 DPA10103-DPB14001 DPA10103-DPB14101 DPA10103-DPB14801 DPA10103-DPB14901 DPA10103-DPB15001 DPA10103-DPB15101 DPA10103-DPB15501 DPA10103-DPB15901 DPA10103-DPB18001 DPA10104-DPB10101 DPA10104-DPB11501 DPA10105-DPB10101 DPA10105-DPB10401 DPA10105-DPB11801 DPA10105-DPB15001 DPA10106-DPB10101 DPA10201-DPB10101 DPA10201-DPB10201 DPA10201-DPB10202 DPA10201-DPB10401 DPA10201-DPB10501 DPA10201-DPB110601 DPA10201-DPB11501 DPA10201-DPB11601 DPA10201-DPB11901 DPA10201-DPB13401 DPA10201-DPB15501 DPA10202-DPB10101 DPA10202-DPB10201 DPA10202-DPB10202 DPA10202-DPB10401 DPA10202-DPB10501 DPA10202-DPB110601 DPA10202-DPB11101 DPA10202-DPB11301 DPA10202-DPB11801 DPA10202-DPB11901 DPA10202-DPB13101 DPA10202-DPB13801; note = HLAs: DPA10202-DPB15501 DPA10202-DPB16501 DPA10301-DPB10101 DPA10301-DPB10201 DPA10301-DPB10202 DPA10301-DPB10401 DPA10301-DPB10402 DPA10301-DPB110501 DPA10301-DPB110601 DPA10301-DPB11101 DPA10301-DPB11301 DPA10301-DPB11801 DPA10301-DPB12301 DPA10301-DPB13901 DPA10301-DPB14001 DPA10301-DPB14901 DPA10301-DPB15501 DPA10301-DPB16501 DPA10301-DPB17501 DPA10301-DPB18001 DPA10401-DPB10101 DPA10401-DPB10201 DPA10401-DPB10202 DPA10401-DPB10402 DPA10401-DPB10501 DPA10401-DPB110501 DPA10401-DPB14901
KEPPILWIGFELEPDKWTVQ

SEQ ID NO: 7299 - protein, 20 aa, synthetic construct
  source 1..20: note = Seed: KEPPFLWMGYELHPDKWTVQ; note = HLAs: DRB1_0101 DRB1_1001 DPA10103-DPB10101 DPA10103-DPB10201 DPA10103-DPB10202 DPA10103-DPB10401 DPA10103-DPB10402 DPA10103-DPB10501 DPA10103-DPB110501 DPA10103-DPB112601 DPA10103-DPB11501 DPA10103-DPB11601 DPA10103-DPB11801 DPA10103-DPB11901 DPA10103-DPB12301 DPA10103-DPB13101 DPA10103-DPB13401 DPA10103-DPB13901 DPA10103-DPB14001 DPA10103-DPB14101 DPA10103-DPB14801 DPA10103-DPB14901 DPA10103-DPB15001 DPA10103-DPB15101 DPA10103-DPB15501 DPA10103-DPB15901 DPA10103-DPB18001 DPA10104-DPB10101 DPA10104-DPB11501 DPA10105-DPB10101 DPA10105-DPB10401 DPA10105-DPB11801 DPA10105-DPB15001 DPA10106-DPB10101 DPA10201-DPB10101 DPA10201-DPB10201 DPA10201-DPB10202 DPA10201-DPB10501 DPA10201-DPB110601 DPA10201-DPB11501 DPA10201-DPB11601 DPA10201-DPB11901 DPA10201-DPB13401 DPA10201-DPB15501 DPA10202-DPB10101 DPA10202-DPB10201 DPA10202-DPB10202 DPA10202-DPB10501 DPA10202-DPB110601 DPA10202-DPB11301 DPA10202-DPB11801 DPA10202-DPB11901 DPA10202-DPB13101 DPA10202-DPB13801 DPA10202-DPB15501; note = HLAs: DPA10202-DPB16501 DPA10301-DPB10101 DPA10301-DPB10201 DPA10301-DPB10202 DPA10301-DPB10401 DPA10301-DPB10402 DPA10301-DPB110501 DPA10301-DPB110601 DPA10301-DPB11301 DPA10301-DPB11801 DPA10301-DPB12301 DPA10301-DPB13901 DPA10301-DPB14001 DPA10301-DPB14901 DPA10301-DPB15501 DPA10301-DPB17501 DPA10301-DPB18001 DPA10401-DPB10101 DPA10401-DPB10201 DPA10401-DPB10202 DPA10401-DPB10402 DPA10401-DPB10501 DPA10401-DPB110501 DPA10401-DPB14901
KEPPFLWHGIELAPDKWTVQ

SEQ ID NO: 7300 - protein, 20 aa, synthetic construct
  source 1..20: note = Seed: KEPPFLWMGYELHPDKWTVQ; note = HLAs: DRB1_0101 DPA10103-DPB10201 DPA10103-DPB10202 DPA10103-DPB10401 DPA10103-DPB10402 DPA10103-DPB10501 DPA10103-DPB110501 DPA10103-DPB112601 DPA10103-DPB11501 DPA10103-DPB11601 DPA10103-DPB11801 DPA10103-DPB11901 DPA10103-DPB12301 DPA10103-DPB13401 DPA10103-DPB13901 DPA10103-DPB14001 DPA10103-DPB14101 DPA10103-DPB14801 DPA10103-DPB14901 DPA10103-DPB15101 DPA10103-DPB15501 DPA10103-DPB15901 DPA10103-DPB18001 DPA10104-DPB11501 DPA10105-DPB10401 DPA10105-DPB11801 DPA10106-DPB10101 DPA10201-DPB10101 DPA10201-DPB10201 DPA10201-DPB10202 DPA10201-DPB10401 DPA10201-DPB10501 DPA10201-DPB110601 DPA10201-DPB11501 DPA10201-DPB11601 DPA10201-DPB11901 DPA10201-DPB13401 DPA10201-DPB15501 DPA10202-DPB10101 DPA10202-DPB10201 DPA10202-DPB10202 DPA10202-DPB10401 DPA10202-DPB10501 DPA10202-DPB110601 DPA10202-DPB11301 DPA10202-DPB11801 DPA10202-DPB11901 DPA10202-DPB13101 DPA10202-DPB13801 DPA10202-DPB15501 DPA10202-DPB16501 DPA10301-DPB10101 DPA10301-DPB10201 DPA10301-DPB10202 DPA10301-DPB10401; note = HLAs: DPA10301-DPB10402 DPA10301-DPB110501 DPA10301-DPB110601 DPA10301-DPB11301 DPA10301-DPB11801 DPA10301-DPB12301 DPA10301-DPB13901 DPA10301-DPB14001 DPA10301-DPB14901 DPA10301-DPB15501 DPA10301-DPB18001 DPA10401-DPB10201 DPA10401-DPB10202 DPA10401-DPB10402 DPA10401-DPB110501 DPA10401-DPB14901
KEPPFLWWGMELLPDKWTVQ

SEQ ID NO: 7301 - protein, 20 aa, synthetic construct
  source 1..20: note = Seed: KEPPFLWMGYELHPDKWTVQ; note = HLAs: DRB1_1001 DPA10103-DPB10101 DPA10103-DPB10201 DPA10103-DPB10202 DPA10103-DPB10401 DPA10103-DPB10402 DPA10103-DPB10501 DPA10103-DPB110501 DPA10103-DPB112601 DPA10103-DPB11501 DPA10103-DPB11601 DPA10103-DPB11801 DPA10103-DPB11901 DPA10103-DPB12301 DPA10103-DPB13101 DPA10103-DPB13401 DPA10103-DPB13901 DPA10103-DPB14001 DPA10103-DPB14101 DPA10103-DPB14801 DPA10103-DPB14901 DPA10103-DPB15001 DPA10103-DPB15101 DPA10103-DPB15501 DPA10103-DPB15901 DPA10103-DPB18001 DPA10104-DPB10101 DPA10104-DPB11501 DPA10105-DPB10101 DPA10105-DPB10401 DPA10105-DPB11801 DPA10105-DPB15001 DPA10106-DPB10101 DPA10201-DPB10101 DPA10201-DPB10201 DPA10201-DPB10202 DPA10201-DPB10401 DPA10201-DPB10501 DPA10201-DPB110601 DPA10201-DPB11501 DPA10201-DPB11601 DPA10201-DPB11901 DPA10201-DPB13401 DPA10201-DPB15501 DPA10202-DPB10101 DPA10202-DPB10201 DPA10202-DPB10202 DPA10202-DPB10401 DPA10202-DPB10501 DPA10202-DPB110601 DPA10202-DPB11101 DPA10202-DPB11301 DPA10202-DPB11801 DPA10202-DPB11901 DPA10202-DPB13101; note = HLAs: DPA10202-DPB13801 DPA10202-DPB15501 DPA10202-DPB16501 DPA10301-DPB10101 DPA10301-DPB10201 DPA10301-DPB10202 DPA10301-DPB10401 DPA10301-DPB10402 DPA10301-DPB110501 DPA10301-DPB110601 DPA10301-DPB11101 DPA10301-DPB11301 DPA10301-DPB11801 DPA10301-DPB12301 DPA10301-DPB13901 DPA10301-DPB14001 DPA10301-DPB14901 DPA10301-DPB15501 DPA10301-DPB16501 DPA10301-DPB17501 DPA10301-DPB18001 DPA10401-DPB10101 DPA10401-DPB10201 DPA10401-DPB10202 DPA10401-DPB10402 DPA10401-DPB10501 DPA10401-DPB110501 DPA10401-DPB14901
KEPPFLWIGYELEPDKWTVQ

SEQ ID NO: 7302 - protein, 20 aa, synthetic construct
  source 1..20: note = Seed: KEPPFLWMGYELHPDKWTVQ; note = HLAs: DPA10103-DPB10101 DPA10103-DPB10201 DPA10103-DPB10202 DPA10103-DPB10401 DPA10103-DPB10402 DPA10103-DPB10501 DPA10103-DPB110501 DPA10103-DPB112601 DPA10103-DPB11501 DPA10103-DPB11601 DPA10103-DPB11801 DPA10103-DPB11901 DPA10103-DPB12301 DPA10103-DPB13101 DPA10103-DPB13401 DPA10103-DPB13901 DPA10103-DPB14001 DPA10103-DPB14101 DPA10103-DPB14801 DPA10103-DPB14901 DPA10103-DPB15001 DPA10103-DPB15101 DPA10103-DPB15501 DPA10103-DPB15901 DPA10103-DPB18001 DPA10104-DPB10101 DPA10104-DPB11501 DPA10105-DPB10101 DPA10105-DPB10401 DPA10105-DPB11801 DPA10105-DPB15001 DPA10106-DPB10101 DPA10201-DPB10101 DPA10201-DPB10201 DPA10201-DPB10202 DPA10201-DPB10401 DPA10201-DPB10501 DPA10201-DPB110601 DPA10201-DPB11501 DPA10201-DPB11601 DPA10201-DPB11901 DPA10201-DPB13401 DPA10201-DPB15501 DPA10202-DPB10101 DPA10202-DPB10201 DPA10202-DPB10202 DPA10202-DPB10401 DPA10202-DPB10501 DPA10202-DPB110601 DPA10202-DPB11101 DPA10202-DPB11301 DPA10202-DPB11801 DPA10202-DPB11901 DPA10202-DPB13101 DPA10202-DPB13801; note = HLAs: DPA10202-DPB15501 DPA10202-DPB16501 DPA10301-DPB10101 DPA10301-DPB10201 DPA10301-DPB10202 DPA10301-DPB10401 DPA10301-DPB10402 DPA10301-DPB110501 DPA10301-DPB110601 DPA10301-DPB11101 DPA10301-DPB11301 DPA10301-DPB11801 DPA10301-DPB12301 DPA10301-DPB13901 DPA10301-DPB14001 DPA10301-DPB14901 DPA10301-DPB15501 DPA10301-DPB16501 DPA10301-DPB17501 DPA10301-DPB18001 DPA10401-DPB10101 DPA10401-DPB10201 DPA10401-DPB10202 DPA10401-DPB10402 DPA10401-DPB10501 DPA10401-DPB110501 DPA10401-DPB14901
KEPPLLWEGFELNPDKWTVQ

SEQ ID NO: 7303 - protein, 20 aa, synthetic construct
  source 1..20: note = Seed: KEPPFLWMGYELHPDKWTVQ; note = HLAs: DRB1_0101 DRB1_1001 DPA10103-DPB10101 DPA10103-DPB10201 DPA10103-DPB10202 DPA10103-DPB10401 DPA10103-DPB10402 DPA10103-DPB10501 DPA10103-DPB110501 DPA10103-DPB112601 DPA10103-DPB11501 DPA10103-DPB11601 DPA10103-DPB11801 DPA10103-DPB11901 DPA10103-DPB12301 DPA10103-DPB13101 DPA10103-DPB13401 DPA10103-DPB13901 DPA10103-DPB14001 DPA10103-DPB14101 DPA10103-DPB14801 DPA10103-DPB14901 DPA10103-DPB15001 DPA10103-DPB15101 DPA10103-DPB15501 DPA10103-DPB15901 DPA10103-DPB18001 DPA10104-DPB10101 DPA10104-DPB11501 DPA10105-DPB10101 DPA10105-DPB10401 DPA10105-DPB11801 DPA10105-DPB15001 DPA10106-DPB10101 DPA10201-DPB10101 DPA10201-DPB10201 DPA10201-DPB10202 DPA10201-DPB10401 DPA10201-DPB10501 DPA10201-DPB110601 DPA10201-DPB11501 DPA10201-DPB11601 DPA10201-DPB11901 DPA10201-DPB13401 DPA10201-DPB15501 DPA10202-DPB10101 DPA10202-DPB10201 DPA10202-DPB10202 DPA10202-DPB10401 DPA10202-DPB10501 DPA10202-DPB110601 DPA10202-DPB11101 DPA10202-DPB11301 DPA10202-DPB11801 DPA10202-DPB11901; note = HLAs: DPA10202-DPB13101 DPA10202-DPB13801 DPA10202-DPB15501 DPA10202-DPB16501 DPA10301-DPB10101 DPA10301-DPB10201 DPA10301-DPB10202 DPA10301-DPB10401 DPA10301-DPB10402 DPA10301-DPB110501 DPA10301-DPB110601 DPA10301-DPB11101 DPA10301-DPB11301 DPA10301-DPB11801 DPA10301-DPB12301 DPA10301-DPB13901 DPA10301-DPB14001 DPA10301-DPB14901 DPA10301-DPB15501 DPA10301-DPB16501 DPA10301-DPB17501 DPA10301-DPB18001 DPA10401-DPB10101 DPA10401-DPB10201 DPA10401-DPB10202 DPA10401-DPB10402 DPA10401-DPB10501 DPA10401-DPB110501 DPA10401-DPB14901
KEPPFLWNGIELFPDKWTVQ

SEQ ID NO: 7304 - protein, 20 aa, synthetic construct
  source 1..20: note = Seed: KEPPFLWMGYELHPDKWTVQ; note = HLAs: DPA10103-DPB10101 DPA10103-DPB10201 DPA10103-DPB10202 DPA10103-DPB10401 DPA10103-DPB10402 DPA10103-DPB10501 DPA10103-DPB110501 DPA10103-DPB112601 DPA10103-DPB11501 DPA10103-DPB11601 DPA10103-DPB11801 DPA10103-DPB11901 DPA10103-DPB12301 DPA10103-DPB13101 DPA10103-DPB13401 DPA10103-DPB13901 DPA10103-DPB14001 DPA10103-DPB14101 DPA10103-DPB14801 DPA10103-DPB14901 DPA10103-DPB15001 DPA10103-DPB15101 DPA10103-DPB15501 DPA10103-DPB15901 DPA10103-DPB18001 DPA10104-DPB10101 DPA10104-DPB11501 DPA10105-DPB10101 DPA10105-DPB10401 DPA10105-DPB11801 DPA10105-DPB15001 DPA10106-DPB10101 DPA10201-DPB10101 DPA10201-DPB10201 DPA10201-DPB10202 DPA10201-DPB10401 DPA10201-DPB10501 DPA10201-DPB110601 DPA10201-DPB11501 DPA10201-DPB11601 DPA10201-DPB11901 DPA10201-DPB13401 DPA10201-DPB15501 DPA10202-DPB10101 DPA10202-DPB10201 DPA10202-DPB10202 DPA10202-DPB10401 DPA10202-DPB10501 DPA10202-DPB110601 DPA10202-DPB11101 DPA10202-DPB11301 DPA10202-DPB11801 DPA10202-DPB11901 DPA10202-DPB13101 DPA10202-DPB13801; note = HLAs: DPA10202-DPB15501 DPA10202-DPB16501 DPA10301-DPB10101 DPA10301-DPB10201 DPA10301-DPB10202 DPA10301-DPB10401 DPA10301-DPB10402 DPA10301-DPB110501 DPA10301-DPB110601 DPA10301-DPB11101 DPA10301-DPB11301 DPA10301-DPB11801 DPA10301-DPB12301 DPA10301-DPB13901 DPA10301-DPB14001 DPA10301-DPB14901 DPA10301-DPB15501 DPA10301-DPB16501 DPA10301-DPB17501 DPA10301-DPB18001 DPA10401-DPB10101 DPA10401-DPB10201 DPA10401-DPB10202 DPA10401-DPB10402 DPA10401-DPB10501 DPA10401-DPB110501 DPA10401-DPB14901
KEPPILWTGYELFPDKWTVQ

SEQ ID NO: 7305 - protein, 20 aa, synthetic construct
  source 1..20: note = Seed: KEPPFLWMGYELHPDKWTVQ; note = HLAs: DRB1_0101 DRB1_0405 DRB1_1001 DPA10103-DPB10101 DPA10103-DPB10201 DPA10103-DPB10202 DPA10103-DPB10401 DPA10103-DPB10402 DPA10103-DPB10501 DPA10103-DPB110501 DPA10103-DPB112601 DPA10103-DPB11501 DPA10103-DPB11601 DPA10103-DPB11801 DPA10103-DPB11901 DPA10103-DPB12301 DPA10103-DPB13101 DPA10103-DPB13401 DPA10103-DPB13901 DPA10103-DPB14001 DPA10103-DPB14101 DPA10103-DPB14801 DPA10103-DPB14901 DPA10103-DPB15001 DPA10103-DPB15101 DPA10103-DPB15501 DPA10103-DPB15901 DPA10103-DPB18001 DPA10104-DPB10101 DPA10104-DPB11501 DPA10105-DPB10101 DPA10105-DPB10401 DPA10105-DPB11801 DPA10105-DPB15001 DPA10106-DPB10101 DPA10201-DPB10101 DPA10201-DPB10201 DPA10201-DPB10202 DPA10201-DPB10401 DPA10201-DPB10501 DPA10201-DPB110601 DPA10201-DPB11501 DPA10201-DPB11601 DPA10201-DPB11901 DPA10201-DPB13401 DPA10201-DPB15501 DPA10202-DPB10101 DPA10202-DPB10201 DPA10202-DPB10202 DPA10202-DPB10401 DPA10202-DPB10501 DPA10202-DPB110601 DPA10202-DPB11101 DPA10202-DPB11301 DPA10202-DPB11801 DPA10202-DPB11901; note = HLAs: DPA10202-DPB13101 DPA10202-DPB13801 DPA10202-DPB15501 DPA10202-DPB16501 DPA10301-DPB10101 DPA10301-DPB10201 DPA10301-DPB10202 DPA10301-DPB10401 DPA10301-DPB10402 DPA10301-DPB110501 DPA10301-DPB110601 DPA10301-DPB11101 DPA10301-DPB11301 DPA10301-DPB11801 DPA10301-DPB12301 DPA10301-DPB13901 DPA10301-DPB14001 DPA10301-DPB14901 DPA10301-DPB15501 DPA10301-DPB16501 DPA10301-DPB17501 DPA10301-DPB18001 DPA10401-DPB10101 DPA10401-DPB10201 DPA10401-DPB10202 DPA10401-DPB10402 DPA10401-DPB10501 DPA10401-DPB110501 DPA10401-DPB14901
KEPPFLWTGAELFPDKWTVQ

SEQ ID NO: 7306 - protein, 20 aa, synthetic construct
  source 1..20: note = Seed: KEPPFLWMGYELHPDKWTVQ; note = HLAs: DPA10103-DPB10101 DPA10103-DPB10201 DPA10103-DPB10202 DPA10103-DPB10401 DPA10103-DPB10402 DPA10103-DPB10501 DPA10103-DPB110501 DPA10103-DPB112601 DPA10103-DPB11501 DPA10103-DPB11601 DPA10103-DPB11801 DPA10103-DPB11901 DPA10103-DPB12301 DPA10103-DPB13101 DPA10103-DPB13401 DPA10103-DPB13901 DPA10103-DPB14001 DPA10103-DPB14101 DPA10103-DPB14801 DPA10103-DPB14901 DPA10103-DPB15001 DPA10103-DPB15101 DPA10103-DPB15501 DPA10103-DPB15901 DPA10103-DPB18001 DPA10104-DPB10101 DPA10104-DPB11501 DPA10105-DPB10101 DPA10105-DPB10401 DPA10105-DPB11801 DPA10105-DPB15001 DPA10106-DPB10101 DPA10201-DPB10101 DPA10201-DPB10201 DPA10201-DPB10202 DPA10201-DPB10501 DPA10201-DPB110601 DPA10201-DPB11501 DPA10201-DPB11601 DPA10201-DPB11901 DPA10201-DPB13401 DPA10201-DPB15501 DPA10202-DPB10101 DPA10202-DPB10201 DPA10202-DPB10202 DPA10202-DPB10401 DPA10202-DPB10501 DPA10202-DPB110601 DPA10202-DPB11301 DPA10202-DPB11801 DPA10202-DPB11901 DPA10202-DPB13101 DPA10202-DPB13801 DPA10202-DPB15501 DPA10202-DPB16501; note = HLAs: DPA10301-DPB10101 DPA10301-DPB10201 DPA10301-DPB10202 DPA10301-DPB10401 DPA10301-DPB10402 DPA10301-DPB110501 DPA10301-DPB110601 DPA10301-DPB11801 DPA10301-DPB12301 DPA10301-DPB13901 DPA10301-DPB14001 DPA10301-DPB14901 DPA10301-DPB15501 DPA10301-DPB16501 DPA10301-DPB17501 DPA10301-DPB18001 DPA10401-DPB10101 DPA10401-DPB10201 DPA10401-DPB10202 DPA10401-DPB10402 DPA10401-DPB10501 DPA10401-DPB110501 DPA10401-DPB14901
KEPPILWAGFELHPDKWTVQ

SEQ ID NO: 7307 - protein, 20 aa, synthetic construct
  source 1..20: note = Seed: KEPPFLWMGYELHPDKWTVQ; note = HLAs: DPA10103-DPB10101 DPA10103-DPB10201 DPA10103-DPB10202 DPA10103-DPB10401 DPA10103-DPB10402 DPA10103-DPB10501 DPA10103-DPB110501 DPA10103-DPB112601 DPA10103-DPB11501 DPA10103-DPB11601 DPA10103-DPB11801 DPA10103-DPB11901 DPA10103-DPB12301 DPA10103-DPB13101 DPA10103-DPB13401 DPA10103-DPB13901 DPA10103-DPB14001 DPA10103-DPB14101 DPA10103-DPB14801 DPA10103-DPB14901 DPA10103-DPB15001 DPA10103-DPB15101 DPA10103-DPB15501 DPA10103-DPB15901 DPA10103-DPB18001 DPA10104-DPB10101 DPA10104-DPB11501 DPA10105-DPB10101 DPA10105-DPB10401 DPA10105-DPB11801 DPA10105-DPB15001 DPA10106-DPB10101 DPA10201-DPB10101 DPA10201-DPB10201 DPA10201-DPB10202 DPA10201-DPB10401 DPA10201-DPB10501 DPA10201-DPB110601 DPA10201-DPB11501 DPA10201-DPB11601 DPA10201-DPB11901 DPA10201-DPB13401 DPA10201-DPB15501 DPA10202-DPB10101 DPA10202-DPB10201 DPA10202-DPB10202 DPA10202-DPB10401 DPA10202-DPB10501 DPA10202-DPB110601 DPA10202-DPB11101 DPA10202-DPB11301 DPA10202-DPB11901 DPA10202-DPB13101 DPA10202-DPB13801 DPA10202-DPB15501; note = HLAs: DPA10202-DPB16501 DPA10301-DPB10101 DPA10301-DPB10201 DPA10301-DPB10202 DPA10301-DPB10401 DPA10301-DPB10402 DPA10301-DPB110501 DPA10301-DPB110601 DPA10301-DPB11101 DPA10301-DPB11301 DPA10301-DPB11801 DPA10301-DPB12301 DPA10301-DPB13901 DPA10301-DPB14001 DPA10301-DPB14901 DPA10301-DPB15501 DPA10301-DPB16501 DPA10301-DPB17501 DPA10301-DPB18001 DPA10401-DPB10101 DPA10401-DPB10201 DPA10401-DPB10202 DPA10401-DPB10402 DPA10401-DPB10501 DPA10401-DPB110501 DPA10401-DPB14901
KEPPFLWNGFELDPDKWTVQ

SEQ ID NO: 7308 - protein, 20 aa, synthetic construct
  source 1..20: note = Seed: KEPPFLWMGYELHPDKWTVQ; note = HLAs: DRB1_0101 DPA10103-DPB10101 DPA10103-DPB10201 DPA10103-DPB10202 DPA10103-DPB10401 DPA10103-DPB10402 DPA10103-DPB10501 DPA10103-DPB110501 DPA10103-DPB112601 DPA10103-DPB11501 DPA10103-DPB11601 DPA10103-DPB11801 DPA10103-DPB11901 DPA10103-DPB12301 DPA10103-DPB13101 DPA10103-DPB13401 DPA10103-DPB13901 DPA10103-DPB14001 DPA10103-DPB14101 DPA10103-DPB14801 DPA10103-DPB14901 DPA10103-DPB15001 DPA10103-DPB15101 DPA10103-DPB15501 DPA10103-DPB15901 DPA10103-DPB18001 DPA10104-DPB10101 DPA10104-DPB11501 DPA10105-DPB10101 DPA10105-DPB10401 DPA10105-DPB11801 DPA10105-DPB15001 DPA10106-DPB10101 DPA10201-DPB10101 DPA10201-DPB10201 DPA10201-DPB10202 DPA10201-DPB10401 DPA10201-DPB10501 DPA10201-DPB110601 DPA10201-DPB11501 DPA10201-DPB11601 DPA10201-DPB11901 DPA10201-DPB13401 DPA10201-DPB15501 DPA10202-DPB10101 DPA10202-DPB10201 DPA10202-DPB10202 DPA10202-DPB10401 DPA10202-DPB10501 DPA10202-DPB110601 DPA10202-DPB11101 DPA10202-DPB11301 DPA10202-DPB11801 DPA10202-DPB11901 DPA10202-DPB13101; note = HLAs: DPA10202-DPB13801 DPA10202-DPB15501 DPA10202-DPB16501 DPA10301-DPB10101 DPA10301-DPB10201 DPA10301-DPB10202 DPA10301-DPB10401 DPA10301-DPB10402 DPA10301-DPB110501 DPA10301-DPB110601 DPA10301-DPB11101 DPA10301-DPB11301 DPA10301-DPB11801 DPA10301-DPB12301 DPA10301-DPB13901 DPA10301-DPB14001 DPA10301-DPB14901 DPA10301-DPB15501 DPA10301-DPB16501 DPA10301-DPB17501 DPA10301-DPB18001 DPA10401-DPB10101 DPA10401-DPB10201 DPA10401-DPB10202 DPA10401-DPB10402 DPA10401-DPB10501 DPA10401-DPB110501 DPA10401-DPB14901
KEPPFLWNGMELVPDKWTVQ

SEQ ID NO: 7309 - protein, 20 aa, synthetic construct
  source 1..20: note = Seed: KEPPFLWMGYELHPDKWTVQ; note = HLAs: DRB1_0101 DRB1_1001 DPA10103-DPB10101 DPA10103-DPB10201 DPA10103-DPB10202 DPA10103-DPB10401 DPA10103-DPB10402 DPA10103-DPB10501 DPA10103-DPB110501 DPA10103-DPB112601 DPA10103-DPB11501 DPA10103-DPB11601 DPA10103-DPB11801 DPA10103-DPB11901 DPA10103-DPB12301 DPA10103-DPB13101 DPA10103-DPB13401 DPA10103-DPB13901 DPA10103-DPB14001 DPA10103-DPB14101 DPA10103-DPB14801 DPA10103-DPB14901 DPA10103-DPB15001 DPA10103-DPB15101 DPA10103-DPB15501 DPA10103-DPB15901 DPA10103-DPB18001 DPA10104-DPB10101 DPA10104-DPB11501 DPA10105-DPB10101 DPA10105-DPB10401 DPA10105-DPB11801 DPA10105-DPB15001 DPA10106-DPB10101 DPA10201-DPB10101 DPA10201-DPB10201 DPA10201-DPB10202 DPA10201-DPB10401 DPA10201-DPB10501 DPA10201-DPB110601 DPA10201-DPB11501 DPA10201-DPB11601 DPA10201-DPB11901 DPA10201-DPB13401 DPA10201-DPB15501 DPA10202-DPB10101 DPA10202-DPB10201 DPA10202-DPB10202 DPA10202-DPB10501 DPA10202-DPB110601 DPA10202-DPB11301 DPA10202-DPB11801 DPA10202-DPB11901 DPA10202-DPB13101 DPA10202-DPB13801; note = HLAs: DPA10202-DPB15501 DPA10202-DPB16501 DPA10301-DPB10101 DPA10301-DPB10201 DPA10301-DPB10202 DPA10301-DPB10401 DPA10301-DPB10402 DPA10301-DPB110501 DPA10301-DPB110601 DPA10301-DPB11101 DPA10301-DPB11301 DPA10301-DPB11801 DPA10301-DPB12301 DPA10301-DPB13901 DPA10301-DPB14001 DPA10301-DPB14901 DPA10301-DPB15501 DPA10301-DPB16501 DPA10301-DPB17501 DPA10301-DPB18001 DPA10401-DPB10101 DPA10401-DPB10201 DPA10401-DPB10202 DPA10401-DPB10402 DPA10401-DPB10501 DPA10401-DPB110501 DPA10401-DPB14901
KEPPFLWAGLELAPDKWTVQ

SEQ ID NO: 7310 - protein, 14 aa, synthetic construct
  source 1..14: note = Seed: PPFLWMGYELHPDK; note = HLAs: DPA10103-DPB10101 DPA10103-DPB10201 DPA10103-DPB10202 DPA10103-DPB10401 DPA10103-DPB112601 DPA10103-DPB11501 DPA10103-DPB11601 DPA10103-DPB11901 DPA10103-DPB12301 DPA10103-DPB13101 DPA10103-DPB13401 DPA10103-DPB13901 DPA10103-DPB14001 DPA10103-DPB14101 DPA10103-DPB14801 DPA10103-DPB15001 DPA10103-DPB15901 DPA10104-DPB10101 DPA10104-DPB11501 DPA10105-DPB10101 DPA10105-DPB10401 DPA10105-DPB15001 DPA10106-DPB10101 DPA10201-DPB10101 DPA10201-DPB110601 DPA10201-DPB11501 DPA10201-DPB11601 DPA10201-DPB11901 DPA10202-DPB10101 DPA10202-DPB10201 DPA10202-DPB10202 DPA10202-DPB10401 DPA10202-DPB110601 DPA10202-DPB11901 DPA10202-DPB13101 DPA10202-DPB16501 DPA10301-DPB10101 DPA10301-DPB10201 DPA10301-DPB10202 DPA10301-DPB10401 DPA10301-DPB10402 DPA10301-DPB110501 DPA10301-DPB110601 DPA10301-DPB11801 DPA10301-DPB12301 DPA10301-DPB13901 DPA10301-DPB14001 DPA10301-DPB14901 DPA10301-DPB15501 DPA10301-DPB16501 DPA10301-DPB17501 DPA10301-DPB18001 DPA10401-DPB10101 DPA10401-DPB10201; note = HLAs: DPA10401-DPB10202 DPA10401-DPB10402 DPA10401-DPB10501 DPA10401-DPB110501 DPA10401-DPB14901
PPILWSGLELLPDK

SEQ ID NO: 7311 - protein, 20 aa, synthetic construct
  source 1..20: note = Seed: KEPPFLWMGYELHPDKWTVQ; note = HLAs: DRB1_1001 DPA10103-DPB10101 DPA10103-DPB10201 DPA10103-DPB10202 DPA10103-DPB10401 DPA10103-DPB10402 DPA10103-DPB10501 DPA10103-DPB110501 DPA10103-DPB112601 DPA10103-DPB11501 DPA10103-DPB11601 DPA10103-DPB11801 DPA10103-DPB11901 DPA10103-DPB12301 DPA10103-DPB13101 DPA10103-DPB13401 DPA10103-DPB13901 DPA10103-DPB14001 DPA10103-DPB14101 DPA10103-DPB14801 DPA10103-DPB14901 DPA10103-DPB15001 DPA10103-DPB15101 DPA10103-DPB15501 DPA10103-DPB15901 DPA10103-DPB18001 DPA10104-DPB10101 DPA10104-DPB11501 DPA10105-DPB10101 DPA10105-DPB10401 DPA10105-DPB11801 DPA10105-DPB15001 DPA10106-DPB10101 DPA10201-DPB10101 DPA10201-DPB10201 DPA10201-DPB10202 DPA10201-DPB10401 DPA10201-DPB10501 DPA10201-DPB110601 DPA10201-DPB11501 DPA10201-DPB11601 DPA10201-DPB11901 DPA10201-DPB13401 DPA10201-DPB15501 DPA10202-DPB10101 DPA10202-DPB10201 DPA10202-DPB10202 DPA10202-DPB10401 DPA10202-DPB10501 DPA10202-DPB110601 DPA10202-DPB11101 DPA10202-DPB11301 DPA10202-DPB11801 DPA10202-DPB11901 DPA10202-DPB13101; note = HLAs: DPA10202-DPB13801 DPA10202-DPB15501 DPA10202-DPB16501 DPA10301-DPB10101 DPA10301-DPB10201 DPA10301-DPB10202 DPA10301-DPB10401 DPA10301-DPB10402 DPA10301-DPB110501 DPA10301-DPB110601 DPA10301-DPB11101 DPA10301-DPB11301 DPA10301-DPB11801 DPA10301-DPB12301 DPA10301-DPB13901 DPA10301-DPB14001 DPA10301-DPB14901 DPA10301-DPB15501 DPA10301-DPB16501 DPA10301-DPB17501 DPA10301-DPB18001 DPA10401-DPB10101 DPA10401-DPB10201 DPA10401-DPB10202 DPA10401-DPB10402 DPA10401-DPB10501 DPA10401-DPB110501 DPA10401-DPB14901
KEPPFLWQGFELDPDKWTVQ

SEQ ID NO: 7312 - protein, 14 aa, synthetic construct
  source 1..14: note = Seed: PPFLWMGYELHPDK; note = HLAs: DPA10103-DPB10101 DPA10103-DPB10201 DPA10103-DPB10202 DPA10103-DPB10401 DPA10103-DPB112601 DPA10103-DPB11501 DPA10103-DPB11601 DPA10103-DPB11901 DPA10103-DPB12301 DPA10103-DPB13101 DPA10103-DPB13401 DPA10103-DPB13901 DPA10103-DPB14001 DPA10103-DPB14101 DPA10103-DPB14801 DPA10103-DPB15001 DPA10103-DPB15901 DPA10104-DPB10101 DPA10104-DPB11501 DPA10105-DPB10101 DPA10105-DPB10401 DPA10105-DPB15001 DPA10106-DPB10101 DPA10201-DPB10101 DPA10201-DPB110601 DPA10201-DPB11501 DPA10201-DPB11601 DPA10201-DPB11901 DPA10202-DPB10101 DPA10202-DPB10201 DPA10202-DPB10202 DPA10202-DPB10401 DPA10202-DPB110601 DPA10202-DPB11901 DPA10202-DPB13101 DPA10202-DPB16501 DPA10301-DPB10101 DPA10301-DPB10201 DPA10301-DPB10202 DPA10301-DPB10401 DPA10301-DPB10402 DPA10301-DPB110501 DPA10301-DPB110601 DPA10301-DPB11801 DPA10301-DPB12301 DPA10301-DPB13901 DPA10301-DPB14001 DPA10301-DPB14901 DPA10301-DPB15501 DPA10301-DPB16501 DPA10301-DPB17501 DPA10301-DPB18001 DPA10401-DPB10101 DPA10401-DPB10201; note = HLAs: DPA10401-DPB10202 DPA10401-DPB10402 DPA10401-DPB10501 DPA10401-DPB110501 DPA10401-DPB14901
PPMLWSGFELYPDK

SEQ ID NO: 7313 - protein, 20 aa, synthetic construct
  source 1..20: note = Seed: KEPPFLWMGYELHPDKWTVQ; note = HLAs: DPA10103-DPB10201 DPA10103-DPB10202 DPA10103-DPB10401 DPA10103-DPB10402 DPA10103-DPB10501 DPA10103-DPB110501 DPA10103-DPB112601 DPA10103-DPB11501 DPA10103-DPB11601 DPA10103-DPB11801 DPA10103-DPB11901 DPA10103-DPB12301 DPA10103-DPB13101 DPA10103-DPB13401 DPA10103-DPB13901 DPA10103-DPB14001 DPA10103-DPB14101 DPA10103-DPB14801 DPA10103-DPB14901 DPA10103-DPB15001 DPA10103-DPB15101 DPA10103-DPB15501 DPA10103-DPB15901 DPA10103-DPB18001 DPA10104-DPB11501 DPA10105-DPB10401 DPA10105-DPB11801 DPA10105-DPB15001 DPA10106-DPB10101 DPA10201-DPB10101 DPA10201-DPB10201 DPA10201-DPB10202 DPA10201-DPB10401 DPA10201-DPB10501 DPA10201-DPB110601 DPA10201-DPB11501 DPA10201-DPB11601 DPA10201-DPB11901 DPA10201-DPB13401 DPA10201-DPB15501 DPA10202-DPB10201 DPA10202-DPB10202 DPA10202-DPB10401 DPA10202-DPB10501 DPA10202-DPB110601 DPA10202-DPB11301 DPA10202-DPB11801 DPA10202-DPB11901 DPA10202-DPB13101 DPA10202-DPB13801 DPA10202-DPB15501 DPA10301-DPB10101 DPA10301-DPB10201 DPA10301-DPB10202 DPA10301-DPB10402; note = HLAs: DPA10301-DPB110501 DPA10301-DPB110601 DPA10301-DPB11301 DPA10301-DPB11801 DPA10301-DPB14001 DPA10301-DPB14901 DPA10301-DPB16501 DPA10301-DPB17501 DPA10301-DPB18001 DPA10401-DPB10201 DPA10401-DPB10202 DPA10401-DPB10402 DPA10401-DPB10501 DPA10401-DPB110501 DPA10401-DPB14901
KEPPMLWWGFELLPDKWTVQ

SEQ ID NO: 7314 - protein, 20 aa, synthetic construct
  source 1..20: note = Seed: KEPPFLWMGYELHPDKWTVQ; note = HLAs: DPA10103-DPB10101 DPA10103-DPB10201 DPA10103-DPB10202 DPA10103-DPB10401 DPA10103-DPB10402 DPA10103-DPB10501 DPA10103-DPB110501 DPA10103-DPB112601 DPA10103-DPB11501 DPA10103-DPB11601 DPA10103-DPB11801 DPA10103-DPB11901 DPA10103-DPB12301 DPA10103-DPB13101 DPA10103-DPB13401 DPA10103-DPB13901 DPA10103-DPB14001 DPA10103-DPB14101 DPA10103-DPB14801 DPA10103-DPB14901 DPA10103-DPB15001 DPA10103-DPB15101 DPA10103-DPB15501 DPA10103-DPB15901 DPA10103-DPB18001 DPA10104-DPB10101 DPA10104-DPB11501 DPA10105-DPB10101 DPA10105-DPB10401 DPA10105-DPB11801 DPA10105-DPB15001 DPA10106-DPB10101 DPA10201-DPB10101 DPA10201-DPB10201 DPA10201-DPB10202 DPA10201-DPB10401 DPA10201-DPB10501 DPA10201-DPB110601 DPA10201-DPB11501 DPA10201-DPB11601 DPA10201-DPB11901 DPA10201-DPB13401 DPA10201-DPB15501 DPA10202-DPB10101 DPA10202-DPB10201 DPA10202-DPB10202 DPA10202-DPB10401 DPA10202-DPB10501 DPA10202-DPB110601 DPA10202-DPB11301 DPA10202-DPB11801 DPA10202-DPB11901 DPA10202-DPB13101 DPA10202-DPB13801 DPA10202-DPB15501; note = HLAs: DPA10202-DPB16501 DPA10301-DPB10101 DPA10301-DPB10201 DPA10301-DPB10202 DPA10301-DPB10401 DPA10301-DPB10402 DPA10301-DPB110501 DPA10301-DPB110601 DPA10301-DPB11801 DPA10301-DPB12301 DPA10301-DPB13901 DPA10301-DPB14001 DPA10301-DPB14901 DPA10301-DPB16501 DPA10301-DPB17501 DPA10301-DPB18001 DPA10401-DPB10101 DPA10401-DPB10201 DPA10401-DPB10202 DPA10401-DPB10402 DPA10401-DPB10501 DPA10401-DPB110501 DPA10401-DPB14901
KEPPFLWWGFELHPDKWTVQ

SEQ ID NO: 7315 - protein, 14 aa, synthetic construct
  source 1..14: note = Seed: PPFLWMGYELHPDK; note = HLAs: DPA10103-DPB10101 DPA10103-DPB10201 DPA10103-DPB10202 DPA10103-DPB10401 DPA10103-DPB112601 DPA10103-DPB11501 DPA10103-DPB11601 DPA10103-DPB11901 DPA10103-DPB12301 DPA10103-DPB13101 DPA10103-DPB13401 DPA10103-DPB13901 DPA10103-DPB14001 DPA10103-DPB14101 DPA10103-DPB14801 DPA10103-DPB15001 DPA10103-DPB15901 DPA10104-DPB10101 DPA10104-DPB11501 DPA10105-DPB10101 DPA10105-DPB10401 DPA10105-DPB15001 DPA10106-DPB10101 DPA10201-DPB10101 DPA10201-DPB110601 DPA10201-DPB11501 DPA10201-DPB11601 DPA10201-DPB11901 DPA10202-DPB10101 DPA10202-DPB10201 DPA10202-DPB10202 DPA10202-DPB10401 DPA10202-DPB110601 DPA10202-DPB11901 DPA10202-DPB13101 DPA10202-DPB16501 DPA10301-DPB10101 DPA10301-DPB10201 DPA10301-DPB10202 DPA10301-DPB10401 DPA10301-DPB10402 DPA10301-DPB110501 DPA10301-DPB110601 DPA10301-DPB11801 DPA10301-DPB12301 DPA10301-DPB13901 DPA10301-DPB14001 DPA10301-DPB14901 DPA10301-DPB15501 DPA10301-DPB16501 DPA10301-DPB17501 DPA10301-DPB18001 DPA10401-DPB10101 DPA10401-DPB10201; note = HLAs: DPA10401-DPB10202 DPA10401-DPB10402 DPA10401-DPB110501 DPA10401-DPB14901
PPILWGGFELVPDK

SEQ ID NO: 7316 - protein, 20 aa, synthetic construct
  source 1..20: note = Seed: KEPPFLWMGYELHPDKWTVQ; note = HLAs: DPA10103-DPB10101 DPA10103-DPB10201 DPA10103-DPB10202 DPA10103-DPB10401 DPA10103-DPB10402 DPA10103-DPB10501 DPA10103-DPB110501 DPA10103-DPB112601 DPA10103-DPB11501 DPA10103-DPB11601 DPA10103-DPB11801 DPA10103-DPB11901 DPA10103-DPB12301 DPA10103-DPB13101 DPA10103-DPB13401 DPA10103-DPB13901 DPA10103-DPB14001 DPA10103-DPB14101 DPA10103-DPB14801 DPA10103-DPB14901 DPA10103-DPB15001 DPA10103-DPB15101 DPA10103-DPB15501 DPA10103-DPB15901 DPA10103-DPB18001 DPA10104-DPB10101 DPA10104-DPB11501 DPA10105-DPB10101 DPA10105-DPB10401 DPA10105-DPB11801 DPA10105-DPB15001 DPA10106-DPB10101 DPA10201-DPB10101 DPA10201-DPB10201 DPA10201-DPB10202 DPA10201-DPB10401 DPA10201-DPB10501 DPA10201-DPB110601 DPA10201-DPB11501 DPA10201-DPB11601 DPA10201-DPB11901 DPA10201-DPB13401 DPA10201-DPB15501 DPA10202-DPB10101 DPA10202-DPB10201 DPA10202-DPB10202 DPA10202-DPB10401 DPA10202-DPB10501 DPA10202-DPB110601 DPA10202-DPB11101 DPA10202-DPB11301 DPA10202-DPB11801 DPA10202-DPB11901 DPA10202-DPB13101 DPA10202-DPB13801; note = HLAs: DPA10202-DPB15501 DPA10202-DPB16501 DPA10301-DPB10101 DPA10301-DPB10201 DPA10301-DPB10202 DPA10301-DPB10401 DPA10301-DPB10402 DPA10301-DPB110501 DPA10301-DPB110601 DPA10301-DPB11101 DPA10301-DPB11301 DPA10301-DPB11801 DPA10301-DPB12301 DPA10301-DPB13901 DPA10301-DPB14001 DPA10301-DPB14901 DPA10301-DPB15501 DPA10301-DPB16501 DPA10301-DPB17501 DPA10301-DPB18001 DPA10401-DPB10101 DPA10401-DPB10201 DPA10401-DPB10202 DPA10401-DPB10402 DPA10401-DPB10501 DPA10401-DPB110501 DPA10401-DPB14901
KEPPRLWSGFELVPDKWTVQ

SEQ ID NO: 7317 - protein, 20 aa, synthetic construct
  source 1..20: note = Seed: KEPPFLWMGYELHPDKWTVQ; note = HLAs: DPA10103-DPB10101 DPA10103-DPB10201 DPA10103-DPB10202 DPA10103-DPB10401 DPA10103-DPB10402 DPA10103-DPB10501 DPA10103-DPB110501 DPA10103-DPB112601 DPA10103-DPB11501 DPA10103-DPB11601 DPA10103-DPB11801 DPA10103-DPB11901 DPA10103-DPB12301 DPA10103-DPB13101 DPA10103-DPB13401 DPA10103-DPB13901 DPA10103-DPB14001 DPA10103-DPB14101 DPA10103-DPB14801 DPA10103-DPB14901 DPA10103-DPB15001 DPA10103-DPB15101 DPA10103-DPB15501 DPA10103-DPB15901 DPA10103-DPB18001 DPA10104-DPB10101 DPA10104-DPB11501 DPA10105-DPB10101 DPA10105-DPB10401 DPA10105-DPB11801 DPA10105-DPB15001 DPA10106-DPB10101 DPA10201-DPB10101 DPA10201-DPB10201 DPA10201-DPB10202 DPA10201-DPB10401 DPA10201-DPB10501 DPA10201-DPB110601 DPA10201-DPB11501 DPA10201-DPB11601 DPA10201-DPB11901 DPA10201-DPB13401 DPA10201-DPB15501 DPA10202-DPB10101 DPA10202-DPB10201 DPA10202-DPB10202 DPA10202-DPB10401 DPA10202-DPB10501 DPA10202-DPB110601 DPA10202-DPB11101 DPA10202-DPB11301 DPA10202-DPB11801 DPA10202-DPB11901 DPA10202-DPB13101 DPA10202-DPB13801; note = HLAs: DPA10202-DPB15501 DPA10202-DPB16501 DPA10301-DPB10101 DPA10301-DPB10201 DPA10301-DPB10202 DPA10301-DPB10401 DPA10301-DPB10402 DPA10301-DPB110501 DPA10301-DPB110601 DPA10301-DPB11301 DPA10301-DPB11801 DPA10301-DPB12301 DPA10301-DPB13901 DPA10301-DPB14001 DPA10301-DPB14901 DPA10301-DPB15501 DPA10301-DPB16501 DPA10301-DPB17501 DPA10301-DPB18001 DPA10401-DPB10101 DPA10401-DPB10201 DPA10401-DPB10202 DPA10401-DPB10402 DPA10401-DPB10501 DPA10401-DPB110501 DPA10401-DPB14901
KEPPFLWQGFELRPDKWTVQ

SEQ ID NO: 7318 - protein, 20 aa, synthetic construct
  source 1..20: note = Seed: KEPPFLWMGYELHPDKWTVQ; note = HLAs: DRB1_1001 DPA10103-DPB10101 DPA10103-DPB10201 DPA10103-DPB10202 DPA10103-DPB10401 DPA10103-DPB10402 DPA10103-DPB10501 DPA10103-DPB110501 DPA10103-DPB112601 DPA10103-DPB11501 DPA10103-DPB11601 DPA10103-DPB11801 DPA10103-DPB11901 DPA10103-DPB12301 DPA10103-DPB13101 DPA10103-DPB13401 DPA10103-DPB13901 DPA10103-DPB14001 DPA10103-DPB14101 DPA10103-DPB14801 DPA10103-DPB14901 DPA10103-DPB15001 DPA10103-DPB15101 DPA10103-DPB15501 DPA10103-DPB15901 DPA10103-DPB18001 DPA10104-DPB10101 DPA10104-DPB11501 DPA10105-DPB10101 DPA10105-DPB10401 DPA10105-DPB11801 DPA10105-DPB15001 DPA10106-DPB10101 DPA10201-DPB10101 DPA10201-DPB10201 DPA10201-DPB10202 DPA10201-DPB10401 DPA10201-DPB10501 DPA10201-DPB110601 DPA10201-DPB11501 DPA10201-DPB11601 DPA10201-DPB11901 DPA10201-DPB15501 DPA10202-DPB10101 DPA10202-DPB10201 DPA10202-DPB10202 DPA10202-DPB10401 DPA10202-DPB10501 DPA10202-DPB110601 DPA10202-DPB11301 DPA10202-DPB11901 DPA10202-DPB13101 DPA10202-DPB13801 DPA10202-DPB15501 DPA10202-DPB16501; note = HLAs: DPA10301-DPB10101 DPA10301-DPB10201 DPA10301-DPB10202 DPA10301-DPB10401 DPA10301-DPB10402 DPA10301-DPB110501 DPA10301-DPB110601 DPA10301-DPB11101 DPA10301-DPB11301 DPA10301-DPB11801 DPA10301-DPB12301 DPA10301-DPB13901 DPA10301-DPB14001 DPA10301-DPB14901 DPA10301-DPB15501 DPA10301-DPB16501 DPA10301-DPB17501 DPA10301-DPB18001 DPA10401-DPB10101 DPA10401-DPB10201 DPA10401-DPB10202 DPA10401-DPB10402 DPA10401-DPB10501 DPA10401-DPB110501 DPA10401-DPB14901
KEPPWLWEGFELSPDKWTVQ

SEQ ID NO: 7319 - protein, 14 aa, synthetic construct
  source 1..14: note = Seed: PPFLWMGYELHPDK; note = HLAs: DPA10103-DPB10101 DPA10103-DPB10201 DPA10103-DPB10202 DPA10103-DPB10401 DPA10103-DPB112601 DPA10103-DPB11501 DPA10103-DPB11601 DPA10103-DPB11901 DPA10103-DPB12301 DPA10103-DPB13101 DPA10103-DPB13401 DPA10103-DPB13901 DPA10103-DPB14001 DPA10103-DPB14101 DPA10103-DPB14801 DPA10103-DPB15001 DPA10103-DPB15901 DPA10104-DPB10101 DPA10104-DPB11501 DPA10105-DPB10101 DPA10105-DPB10401 DPA10105-DPB15001 DPA10106-DPB10101 DPA10201-DPB10101 DPA10201-DPB110601 DPA10201-DPB11501 DPA10201-DPB11601 DPA10201-DPB11901 DPA10202-DPB10101 DPA10202-DPB10201 DPA10202-DPB10202 DPA10202-DPB10401 DPA10202-DPB110601 DPA10202-DPB11901 DPA10202-DPB13101 DPA10202-DPB16501 DPA10301-DPB10101 DPA10301-DPB10201 DPA10301-DPB10202 DPA10301-DPB10401 DPA10301-DPB10402 DPA10301-DPB110501 DPA10301-DPB110601 DPA10301-DPB11801 DPA10301-DPB12301 DPA10301-DPB13901 DPA10301-DPB14001 DPA10301-DPB14901 DPA10301-DPB15501 DPA10301-DPB16501 DPA10301-DPB17501 DPA10301-DPB18001 DPA10401-DPB10101 DPA10401-DPB10201; note = HLAs: DPA10401-DPB10202 DPA10401-DPB10402 DPA10401-DPB10501 DPA10401-DPB110501 DPA10401-DPB14901
PPFLWPGFELFPDK

SEQ ID NO: 7320 - protein, 20 aa, synthetic construct
  source 1..20: note = Seed: KEPPFLWMGYELHPDKWTVQ; note = HLAs: DRB1_1001 DPA10103-DPB10101 DPA10103-DPB10201 DPA10103-DPB10202 DPA10103-DPB10401 DPA10103-DPB10402 DPA10103-DPB10501 DPA10103-DPB110501 DPA10103-DPB112601 DPA10103-DPB11501 DPA10103-DPB11601 DPA10103-DPB11801 DPA10103-DPB11901 DPA10103-DPB12301 DPA10103-DPB13101 DPA10103-DPB13401 DPA10103-DPB13901 DPA10103-DPB14001 DPA10103-DPB14101 DPA10103-DPB14801 DPA10103-DPB14901 DPA10103-DPB15001 DPA10103-DPB15101 DPA10103-DPB15501 DPA10103-DPB15901 DPA10103-DPB18001 DPA10104-DPB10101 DPA10104-DPB11501 DPA10105-DPB10101 DPA10105-DPB10401 DPA10105-DPB11801 DPA10105-DPB15001 DPA10106-DPB10101 DPA10201-DPB10101 DPA10201-DPB10201 DPA10201-DPB10202 DPA10201-DPB10401 DPA10201-DPB10501 DPA10201-DPB110601 DPA10201-DPB11501 DPA10201-DPB11601 DPA10201-DPB11901 DPA10201-DPB13401 DPA10201-DPB15501 DPA10202-DPB10101 DPA10202-DPB10201 DPA10202-DPB10202 DPA10202-DPB10401 DPA10202-DPB10501 DPA10202-DPB110601 DPA10202-DPB11101 DPA10202-DPB11301 DPA10202-DPB11801 DPA10202-DPB11901 DPA10202-DPB13101; note = HLAs: DPA10202-DPB13801 DPA10202-DPB15501 DPA10202-DPB16501 DPA10301-DPB10101 DPA10301-DPB10201 DPA10301-DPB10202 DPA10301-DPB10401 DPA10301-DPB10402 DPA10301-DPB110501 DPA10301-DPB110601 DPA10301-DPB11101 DPA10301-DPB11301 DPA10301-DPB11801 DPA10301-DPB12301 DPA10301-DPB13901 DPA10301-DPB14001 DPA10301-DPB14901 DPA10301-DPB15501 DPA10301-DPB16501 DPA10301-DPB17501 DPA10301-DPB18001 DPA10401-DPB10101 DPA10401-DPB10201 DPA10401-DPB10202 DPA10401-DPB10402 DPA10401-DPB10501 DPA10401-DPB110501 DPA10401-DPB14901
KEPPILWEGFELNPDKWTVQ

SEQ ID NO: 7321 - protein, 14 aa, synthetic construct
  source 1..14: note = Seed: PPFLWMGYELHPDK; note = HLAs: DPA10103-DPB10101 DPA10103-DPB10201 DPA10103-DPB10202 DPA10103-DPB10401 DPA10103-DPB112601 DPA10103-DPB11501 DPA10103-DPB11601 DPA10103-DPB11901 DPA10103-DPB12301 DPA10103-DPB13101 DPA10103-DPB13401 DPA10103-DPB13901 DPA10103-DPB14001 DPA10103-DPB14101 DPA10103-DPB14801 DPA10103-DPB15001 DPA10103-DPB15901 DPA10104-DPB10101 DPA10104-DPB11501 DPA10105-DPB10101 DPA10105-DPB10401 DPA10105-DPB15001 DPA10106-DPB10101 DPA10201-DPB10101 DPA10201-DPB110601 DPA10201-DPB11501 DPA10201-DPB11601 DPA10201-DPB11901 DPA10202-DPB10101 DPA10202-DPB10201 DPA10202-DPB10202 DPA10202-DPB10401 DPA10202-DPB110601 DPA10202-DPB11901 DPA10202-DPB13101 DPA10202-DPB16501 DPA10301-DPB10101 DPA10301-DPB10201 DPA10301-DPB10202 DPA10301-DPB10401 DPA10301-DPB10402 DPA10301-DPB110501 DPA10301-DPB110601 DPA10301-DPB11801 DPA10301-DPB12301 DPA10301-DPB13901 DPA10301-DPB14001 DPA10301-DPB14901 DPA10301-DPB15501 DPA10301-DPB16501 DPA10301-DPB17501 DPA10301-DPB18001 DPA10401-DPB10101 DPA10401-DPB10201; note = HLAs: DPA10401-DPB10202 DPA10401-DPB10402 DPA10401-DPB10501 DPA10401-DPB110501 DPA10401-DPB14901
PPFLWKGMELLPDK

SEQ ID NO: 7322 - protein, 20 aa, synthetic construct
  source 1..20: note = Seed: KEPPFLWMGYELHPDKWTVQ; note = HLAs: DPA10103-DPB10201 DPA10103-DPB10202 DPA10103-DPB10401 DPA10103-DPB10402 DPA10103-DPB10501 DPA10103-DPB110501 DPA10103-DPB112601 DPA10103-DPB11501 DPA10103-DPB11601 DPA10103-DPB11801 DPA10103-DPB11901 DPA10103-DPB12301 DPA10103-DPB13401 DPA10103-DPB13901 DPA10103-DPB14001 DPA10103-DPB14101 DPA10103-DPB14801 DPA10103-DPB14901 DPA10103-DPB15101 DPA10103-DPB18001 DPA10104-DPB11501 DPA10105-DPB10401 DPA10105-DPB11801 DPA10106-DPB10101 DPA10201-DPB10101 DPA10201-DPB10201 DPA10201-DPB10202 DPA10201-DPB10401 DPA10201-DPB10501 DPA10201-DPB110601 DPA10201-DPB11501 DPA10201-DPB11601 DPA10201-DPB11901 DPA10201-DPB13401 DPA10201-DPB15501 DPA10202-DPB10101 DPA10202-DPB10201 DPA10202-DPB10202 DPA10202-DPB10401 DPA10202-DPB10501 DPA10202-DPB110601 DPA10202-DPB11301 DPA10202-DPB11801 DPA10202-DPB11901 DPA10202-DPB13101 DPA10202-DPB13801 DPA10202-DPB15501 DPA10301-DPB10101 DPA10301-DPB10201 DPA10301-DPB10202 DPA10301-DPB10401 DPA10301-DPB10402 DPA10301-DPB110501 DPA10301-DPB110601; note = HLAs: DPA10301-DPB11801 DPA10301-DPB12301 DPA10301-DPB13901 DPA10301-DPB14001 DPA10301-DPB14901 DPA10301-DPB17501 DPA10301-DPB18001 DPA10401-DPB10201 DPA10401-DPB10202 DPA10401-DPB10402 DPA10401-DPB10501 DPA10401-DPB110501 DPA10401-DPB14901
KEPPILWYGFELLPDKWTVQ

SEQ ID NO: 7323 - protein, 20 aa, synthetic construct
  source 1..20: note = Seed: KEPPFLWMGYELHPDKWTVQ; note = HLAs: DRB1_0101 DRB1_0405 DRB1_1001 DPA10103-DPB10101 DPA10103-DPB10201 DPA10103-DPB10202 DPA10103-DPB10401 DPA10103-DPB10402 DPA10103-DPB10501 DPA10103-DPB110501 DPA10103-DPB112601 DPA10103-DPB11501 DPA10103-DPB11601 DPA10103-DPB11801 DPA10103-DPB11901 DPA10103-DPB12301 DPA10103-DPB13101 DPA10103-DPB13401 DPA10103-DPB13901 DPA10103-DPB14001 DPA10103-DPB14101 DPA10103-DPB14801 DPA10103-DPB14901 DPA10103-DPB15001 DPA10103-DPB15101 DPA10103-DPB15501 DPA10103-DPB15901 DPA10103-DPB18001 DPA10104-DPB10101 DPA10104-DPB11501 DPA10105-DPB10101 DPA10105-DPB10401 DPA10105-DPB11801 DPA10105-DPB15001 DPA10106-DPB10101 DPA10201-DPB10101 DPA10201-DPB10201 DPA10201-DPB10202 DPA10201-DPB10401 DPA10201-DPB10501 DPA10201-DPB110601 DPA10201-DPB11501 DPA10201-DPB11601 DPA10201-DPB11901 DPA10201-DPB13401 DPA10201-DPB15501 DPA10202-DPB10101 DPA10202-DPB10201 DPA10202-DPB10202 DPA10202-DPB10401 DPA10202-DPB10501 DPA10202-DPB110601 DPA10202-DPB11101 DPA10202-DPB11301 DPA10202-DPB11801 DPA10202-DPB11901; note = HLAs: DPA10202-DPB13101 DPA10202-DPB13801 DPA10202-DPB15501 DPA10202-DPB16501 DPA10301-DPB10101 DPA10301-DPB10201 DPA10301-DPB10202 DPA10301-DPB10401 DPA10301-DPB10402 DPA10301-DPB110501 DPA10301-DPB110601 DPA10301-DPB11101 DPA10301-DPB11301 DPA10301-DPB11801 DPA10301-DPB12301 DPA10301-DPB13901 DPA10301-DPB14001 DPA10301-DPB14901 DPA10301-DPB15501 DPA10301-DPB16501 DPA10301-DPB17501 DPA10301-DPB18001 DPA10401-DPB10101 DPA10401-DPB10201 DPA10401-DPB10202 DPA10401-DPB10402 DPA10401-DPB10501 DPA10401-DPB110501 DPA10401-DPB14901
KEPPFLWAGVELVPDKWTVQ

SEQ ID NO: 7324 - protein, 20 aa, synthetic construct
  source 1..20: note = Seed: KEPPFLWMGYELHPDKWTVQ; note = HLAs: DPA10103-DPB10101 DPA10103-DPB10201 DPA10103-DPB10202 DPA10103-DPB10401 DPA10103-DPB10402 DPA10103-DPB10501 DPA10103-DPB110501 DPA10103-DPB112601 DPA10103-DPB11501 DPA10103-DPB11601 DPA10103-DPB11801 DPA10103-DPB11901 DPA10103-DPB12301 DPA10103-DPB13101 DPA10103-DPB13401 DPA10103-DPB13901 DPA10103-DPB14001 DPA10103-DPB14101 DPA10103-DPB14801 DPA10103-DPB14901 DPA10103-DPB15001 DPA10103-DPB15101 DPA10103-DPB15501 DPA10103-DPB15901 DPA10103-DPB18001 DPA10104-DPB10101 DPA10104-DPB11501 DPA10105-DPB10101 DPA10105-DPB10401 DPA10105-DPB11801 DPA10105-DPB15001 DPA10106-DPB10101 DPA10201-DPB10101 DPA10201-DPB10201 DPA10201-DPB10202 DPA10201-DPB10401 DPA10201-DPB10501 DPA10201-DPB110601 DPA10201-DPB11501 DPA10201-DPB11601 DPA10201-DPB11901 DPA10201-DPB13401 DPA10201-DPB15501 DPA10202-DPB10101 DPA10202-DPB10201 DPA10202-DPB10202 DPA10202-DPB10401 DPA10202-DPB10501 DPA10202-DPB110601 DPA10202-DPB11101 DPA10202-DPB11301 DPA10202-DPB11801 DPA10202-DPB11901 DPA10202-DPB13101 DPA10202-DPB13801; note = HLAs: DPA10202-DPB15501 DPA10202-DPB16501 DPA10301-DPB10101 DPA10301-DPB10201 DPA10301-DPB10202 DPA10301-DPB10401 DPA10301-DPB10402 DPA10301-DPB110501 DPA10301-DPB110601 DPA10301-DPB11101 DPA10301-DPB11301 DPA10301-DPB11801 DPA10301-DPB12301 DPA10301-DPB13901 DPA10301-DPB14001 DPA10301-DPB14901 DPA10301-DPB15501 DPA10301-DPB16501 DPA10301-DPB17501 DPA10301-DPB18001 DPA10401-DPB10101 DPA10401-DPB10201 DPA10401-DPB10202 DPA10401-DPB10402 DPA10401-DPB10501 DPA10401-DPB110501 DPA10401-DPB14901
KEPPWLWGGFELLPDKWTVQ

SEQ ID NO: 7325 - protein, 14 aa, synthetic construct
  source 1..14: note = Seed: PPFLWMGYELHPDK; note = HLAs: DPA10103-DPB10101 DPA10103-DPB10201 DPA10103-DPB10202 DPA10103-DPB10401 DPA10103-DPB112601 DPA10103-DPB11501 DPA10103-DPB11601 DPA10103-DPB11901 DPA10103-DPB12301 DPA10103-DPB13101 DPA10103-DPB13401 DPA10103-DPB13901 DPA10103-DPB14001 DPA10103-DPB14101 DPA10103-DPB14801 DPA10103-DPB15001 DPA10103-DPB15901 DPA10104-DPB10101 DPA10104-DPB11501 DPA10105-DPB10101 DPA10105-DPB10401 DPA10105-DPB15001 DPA10106-DPB10101 DPA10201-DPB10101 DPA10201-DPB110601 DPA10201-DPB11501 DPA10201-DPB11601 DPA10201-DPB11901 DPA10202-DPB10101 DPA10202-DPB10201 DPA10202-DPB10202 DPA10202-DPB10401 DPA10202-DPB110601 DPA10202-DPB11901 DPA10202-DPB13101 DPA10202-DPB16501 DPA10301-DPB10101 DPA10301-DPB10201 DPA10301-DPB10202 DPA10301-DPB10401 DPA10301-DPB10402 DPA10301-DPB110501 DPA10301-DPB110601 DPA10301-DPB11801 DPA10301-DPB12301 DPA10301-DPB13901 DPA10301-DPB14001 DPA10301-DPB14901 DPA10301-DPB15501 DPA10301-DPB16501 DPA10301-DPB17501 DPA10301-DPB18001 DPA10401-DPB10101 DPA10401-DPB10201; note = HLAs: DPA10401-DPB10202 DPA10401-DPB10402 DPA10401-DPB10501 DPA10401-DPB110501 DPA10401-DPB14901
PPLLWSGYELMPDK

SEQ ID NO: 7326 - protein, 20 aa, synthetic construct
  source 1..20: note = Seed: KEPPFLWMGYELHPDKWTVQ; note = HLAs: DRB1_0101 DRB1_0405 DRB1_1001 DPA10103-DPB10101 DPA10103-DPB10201 DPA10103-DPB10202 DPA10103-DPB10401 DPA10103-DPB10402 DPA10103-DPB10501 DPA10103-DPB110501 DPA10103-DPB112601 DPA10103-DPB11501 DPA10103-DPB11601 DPA10103-DPB11801 DPA10103-DPB11901 DPA10103-DPB12301 DPA10103-DPB13101 DPA10103-DPB13401 DPA10103-DPB13901 DPA10103-DPB14001 DPA10103-DPB14101 DPA10103-DPB14801 DPA10103-DPB14901 DPA10103-DPB15001 DPA10103-DPB15101 DPA10103-DPB15501 DPA10103-DPB15901 DPA10103-DPB18001 DPA10104-DPB10101 DPA10104-DPB11501 DPA10105-DPB10101 DPA10105-DPB10401 DPA10105-DPB11801 DPA10105-DPB15001 DPA10106-DPB10101 DPA10201-DPB10101 DPA10201-DPB10201 DPA10201-DPB10202 DPA10201-DPB10401 DPA10201-DPB10501 DPA10201-DPB110601 DPA10201-DPB11501 DPA10201-DPB11601 DPA10201-DPB11901 DPA10201-DPB13401 DPA10201-DPB15501 DPA10202-DPB10101 DPA10202-DPB10201 DPA10202-DPB10202 DPA10202-DPB10401 DPA10202-DPB10501 DPA10202-DPB110601 DPA10202-DPB11101 DPA10202-DPB11301 DPA10202-DPB11801 DPA10202-DPB11901; note = HLAs: DPA10202-DPB13101 DPA10202-DPB13801 DPA10202-DPB15501 DPA10202-DPB16501 DPA10301-DPB10101 DPA10301-DPB10201 DPA10301-DPB10202 DPA10301-DPB10401 DPA10301-DPB10402 DPA10301-DPB110501 DPA10301-DPB110601 DPA10301-DPB11101 DPA10301-DPB11301 DPA10301-DPB11801 DPA10301-DPB12301 DPA10301-DPB13901 DPA10301-DPB14001 DPA10301-DPB14901 DPA10301-DPB15501 DPA10301-DPB16501 DPA10301-DPB17501 DPA10301-DPB18001 DPA10401-DPB10101 DPA10401-DPB10201 DPA10401-DPB10202 DPA10401-DPB10402 DPA10401-DPB10501 DPA10401-DPB110501 DPA10401-DPB14901
KEPPFLWEGAELLPDKWTVQ

SEQ ID NO: 7327 - protein, 20 aa, synthetic construct
  source 1..20: note = Seed: KEPPFLWMGYELHPDKWTVQ; note = HLAs: DRB1_0101 DRB1_0405 DRB1_1001 DPA10103-DPB10101 DPA10103-DPB10201 DPA10103-DPB10202 DPA10103-DPB10401 DPA10103-DPB10402 DPA10103-DPB10501 DPA10103-DPB110501 DPA10103-DPB112601 DPA10103-DPB11501 DPA10103-DPB11601 DPA10103-DPB11801 DPA10103-DPB11901 DPA10103-DPB12301 DPA10103-DPB13101 DPA10103-DPB13401 DPA10103-DPB13901 DPA10103-DPB14001 DPA10103-DPB14101 DPA10103-DPB14801 DPA10103-DPB14901 DPA10103-DPB15001 DPA10103-DPB15101 DPA10103-DPB15501 DPA10103-DPB15901 DPA10103-DPB18001 DPA10104-DPB10101 DPA10104-DPB11501 DPA10105-DPB10101 DPA10105-DPB10401 DPA10105-DPB11801 DPA10105-DPB15001 DPA10106-DPB10101 DPA10201-DPB10101 DPA10201-DPB10201 DPA10201-DPB10202 DPA10201-DPB10401 DPA10201-DPB10501 DPA10201-DPB110601 DPA10201-DPB11501 DPA10201-DPB11601 DPA10201-DPB11901 DPA10201-DPB13401 DPA10201-DPB15501 DPA10202-DPB10101 DPA10202-DPB10201 DPA10202-DPB10202 DPA10202-DPB10401 DPA10202-DPB10501 DPA10202-DPB110601 DPA10202-DPB11101 DPA10202-DPB11301 DPA10202-DPB11801 DPA10202-DPB11901; note = HLAs: DPA10202-DPB13101 DPA10202-DPB13801 DPA10202-DPB15501 DPA10202-DPB16501 DPA10301-DPB10101 DPA10301-DPB10201 DPA10301-DPB10202 DPA10301-DPB10401 DPA10301-DPB10402 DPA10301-DPB110501 DPA10301-DPB110601 DPA10301-DPB11101 DPA10301-DPB11301 DPA10301-DPB11801 DPA10301-DPB12301 DPA10301-DPB13901 DPA10301-DPB14001 DPA10301-DPB14901 DPA10301-DPB15501 DPA10301-DPB16501 DPA10301-DPB17501 DPA10301-DPB18001 DPA10401-DPB10101 DPA10401-DPB10201 DPA10401-DPB10202 DPA10401-DPB10402 DPA10401-DPB10501 DPA10401-DPB110501 DPA10401-DPB14901
KEPPFLWSGAELVPDKWTVQ

SEQ ID NO: 7328 - protein, 20 aa, synthetic construct
  source 1..20: note = Seed: KEPPFLWMGYELHPDKWTVQ; note = HLAs: DPA10103-DPB10101 DPA10103-DPB10201 DPA10103-DPB10202 DPA10103-DPB10401 DPA10103-DPB10402 DPA10103-DPB10501 DPA10103-DPB110501 DPA10103-DPB112601 DPA10103-DPB11501 DPA10103-DPB11601 DPA10103-DPB11801 DPA10103-DPB11901 DPA10103-DPB12301 DPA10103-DPB13101 DPA10103-DPB13401 DPA10103-DPB13901 DPA10103-DPB14001 DPA10103-DPB14101 DPA10103-DPB14801 DPA10103-DPB14901 DPA10103-DPB15001 DPA10103-DPB15101 DPA10103-DPB15501 DPA10103-DPB15901 DPA10103-DPB18001 DPA10104-DPB10101 DPA10104-DPB11501 DPA10105-DPB10101 DPA10105-DPB10401 DPA10105-DPB11801 DPA10105-DPB15001 DPA10106-DPB10101 DPA10201-DPB10101 DPA10201-DPB10201 DPA10201-DPB10202 DPA10201-DPB10401 DPA10201-DPB10501 DPA10201-DPB110601 DPA10201-DPB11501 DPA10201-DPB11601 DPA10201-DPB11901 DPA10201-DPB13401 DPA10201-DPB15501 DPA10202-DPB10101 DPA10202-DPB10201 DPA10202-DPB10202 DPA10202-DPB10401 DPA10202-DPB10501 DPA10202-DPB110601 DPA10202-DPB11101 DPA10202-DPB11301 DPA10202-DPB11801 DPA10202-DPB11901 DPA10202-DPB13101 DPA10202-DPB13801; note = HLAs: DPA10202-DPB15501 DPA10202-DPB16501 DPA10301-DPB10101 DPA10301-DPB10201 DPA10301-DPB10202 DPA10301-DPB10401 DPA10301-DPB10402 DPA10301-DPB110501 DPA10301-DPB110601 DPA10301-DPB11101 DPA10301-DPB11301 DPA10301-DPB11801 DPA10301-DPB12301 DPA10301-DPB13901 DPA10301-DPB14001 DPA10301-DPB14901 DPA10301-DPB15501 DPA10301-DPB16501 DPA10301-DPB17501 DPA10301-DPB18001 DPA10401-DPB10101 DPA10401-DPB10201 DPA10401-DPB10202 DPA10401-DPB10402 DPA10401-DPB10501 DPA10401-DPB110501 DPA10401-DPB14901
KEPPILWAGFELEPDKWTVQ

SEQ ID NO: 7329 - protein, 14 aa, synthetic construct
  source 1..14: note = Seed: PPFLWMGYELHPDK; note = HLAs: DPA10103-DPB10101 DPA10103-DPB10201 DPA10103-DPB10202 DPA10103-DPB10401 DPA10103-DPB112601 DPA10103-DPB11501 DPA10103-DPB11601 DPA10103-DPB11901 DPA10103-DPB12301 DPA10103-DPB13101 DPA10103-DPB13401 DPA10103-DPB13901 DPA10103-DPB14001 DPA10103-DPB14101 DPA10103-DPB14801 DPA10103-DPB15001 DPA10103-DPB15901 DPA10104-DPB10101 DPA10104-DPB11501 DPA10105-DPB10101 DPA10105-DPB10401 DPA10105-DPB15001 DPA10106-DPB10101 DPA10201-DPB10101 DPA10201-DPB110601 DPA10201-DPB11501 DPA10201-DPB11601 DPA10201-DPB11901 DPA10202-DPB10101 DPA10202-DPB10201 DPA10202-DPB10202 DPA10202-DPB10401 DPA10202-DPB110601 DPA10202-DPB11901 DPA10202-DPB13101 DPA10202-DPB16501 DPA10301-DPB10101 DPA10301-DPB10201 DPA10301-DPB10202 DPA10301-DPB10401 DPA10301-DPB10402 DPA10301-DPB110501 DPA10301-DPB110601 DPA10301-DPB11801 DPA10301-DPB12301 DPA10301-DPB13901 DPA10301-DPB14001 DPA10301-DPB14901 DPA10301-DPB15501 DPA10301-DPB16501 DPA10301-DPB17501 DPA10301-DPB18001 DPA10401-DPB10101 DPA10401-DPB10201; note = HLAs: DPA10401-DPB10202 DPA10401-DPB10402 DPA10401-DPB10501 DPA10401-DPB110501 DPA10401-DPB14901
PPFLWKGWELVPDK

SEQ ID NO: 7330 - protein, 20 aa, synthetic construct
  source 1..20: note = Seed: KEPPFLWMGYELHPDKWTVQ; note = HLAs: DRB1_0101 DRB1_0405 DRB1_1001 DPA10103-DPB10202 DPA10103-DPB11501 DPA10103-DPB11801 DPA10103-DPB13401 DPA10103-DPB14001 DPA10103-DPB15901 DPA10104-DPB11501 DPA10105-DPB11801 DPA10201-DPB10201 DPA10201-DPB10202 DPA10201-DPB10501 DPA10201-DPB110601 DPA10201-DPB11501 DPA10201-DPB11601 DPA10201-DPB11901 DPA10201-DPB13401 DPA10201-DPB15501 DPA10202-DPB10101 DPA10202-DPB10201 DPA10202-DPB10202 DPA10202-DPB10401 DPA10202-DPB10501 DPA10202-DPB110601 DPA10202-DPB11101 DPA10202-DPB11301 DPA10202-DPB11801 DPA10202-DPB11901 DPA10202-DPB13101 DPA10202-DPB13801 DPA10202-DPB15501 DPA10202-DPB16501 DPA10301-DPB10201 DPA10301-DPB10202 DPA10301-DPB11801 DPA10301-DPB14001 DPA10401-DPB10202
KEPPFLWFGTELLPDKWTVQ

SEQ ID NO: 7331 - protein, 20 aa, synthetic construct
  source 1..20: note = Seed: KEPPFLWMGYELHPDKWTVQ; note = HLAs: DRB1_0101 DRB1_0405 DRB1_1001 DPA10103-DPB10101 DPA10103-DPB10201 DPA10103-DPB10202 DPA10103-DPB10401 DPA10103-DPB10402 DPA10103-DPB10501 DPA10103-DPB110501 DPA10103-DPB112601 DPA10103-DPB11501 DPA10103-DPB11601 DPA10103-DPB11801 DPA10103-DPB11901 DPA10103-DPB12301 DPA10103-DPB13101 DPA10103-DPB13401 DPA10103-DPB13901 DPA10103-DPB14001 DPA10103-DPB14101 DPA10103-DPB14801 DPA10103-DPB14901 DPA10103-DPB15001 DPA10103-DPB15101 DPA10103-DPB15501 DPA10103-DPB15901 DPA10103-DPB18001 DPA10104-DPB10101 DPA10104-DPB11501 DPA10105-DPB10101 DPA10105-DPB10401 DPA10105-DPB11801 DPA10105-DPB15001 DPA10106-DPB10101 DPA10201-DPB10101 DPA10201-DPB10201 DPA10201-DPB10202 DPA10201-DPB10401 DPA10201-DPB10501 DPA10201-DPB110601 DPA10201-DPB11501 DPA10201-DPB11601 DPA10201-DPB11901 DPA10201-DPB13401 DPA10201-DPB15501 DPA10202-DPB10101 DPA10202-DPB10201 DPA10202-DPB10202 DPA10202-DPB10401 DPA10202-DPB10501 DPA10202-DPB110601 DPA10202-DPB11101 DPA10202-DPB11301 DPA10202-DPB11801 DPA10202-DPB11901; note = HLAs: DPA10202-DPB13101 DPA10202-DPB13801 DPA10202-DPB15501 DPA10202-DPB16501 DPA10301-DPB10101 DPA10301-DPB10201 DPA10301-DPB10202 DPA10301-DPB10401 DPA10301-DPB10402 DPA10301-DPB110501 DPA10301-DPB110601 DPA10301-DPB11101 DPA10301-DPB11301 DPA10301-DPB11801 DPA10301-DPB12301 DPA10301-DPB13901 DPA10301-DPB14001 DPA10301-DPB14901 DPA10301-DPB15501 DPA10301-DPB16501 DPA10301-DPB17501 DPA10301-DPB18001 DPA10401-DPB10101 DPA10401-DPB10201 DPA10401-DPB10202 DPA10401-DPB10402 DPA10401-DPB10501 DPA10401-DPB110501 DPA10401-DPB14901
KEPPFLWSGIELTPDKWTVQ

SEQ ID NO: 7332 - protein, 14 aa, synthetic construct
  source 1..14: note = Seed: PPFLWMGYELHPDK; note = HLAs: DPA10103-DPB10101 DPA10103-DPB10201 DPA10103-DPB10202 DPA10103-DPB10401 DPA10103-DPB112601 DPA10103-DPB11501 DPA10103-DPB11601 DPA10103-DPB11901 DPA10103-DPB12301 DPA10103-DPB13101 DPA10103-DPB13401 DPA10103-DPB13901 DPA10103-DPB14001 DPA10103-DPB14101 DPA10103-DPB14801 DPA10103-DPB15001 DPA10103-DPB15901 DPA10104-DPB10101 DPA10104-DPB11501 DPA10105-DPB10101 DPA10105-DPB10401 DPA10105-DPB15001 DPA10106-DPB10101 DPA10201-DPB10101 DPA10201-DPB110601 DPA10201-DPB11501 DPA10201-DPB11601 DPA10201-DPB11901 DPA10202-DPB10101 DPA10202-DPB10201 DPA10202-DPB10202 DPA10202-DPB10401 DPA10202-DPB110601 DPA10202-DPB11901 DPA10202-DPB13101 DPA10202-DPB16501 DPA10301-DPB10101 DPA10301-DPB10201 DPA10301-DPB10202 DPA10301-DPB10401 DPA10301-DPB10402 DPA10301-DPB110501 DPA10301-DPB110601 DPA10301-DPB11801 DPA10301-DPB12301 DPA10301-DPB13901 DPA10301-DPB14001 DPA10301-DPB14901 DPA10301-DPB15501 DPA10301-DPB16501 DPA10301-DPB17501 DPA10301-DPB18001 DPA10401-DPB10101 DPA10401-DPB10201; note = HLAs: DPA10401-DPB10202 DPA10401-DPB10402 DPA10401-DPB10501 DPA10401-DPB110501 DPA10401-DPB14901
PPWLWSGFELEPDK

SEQ ID NO: 7333 - protein, 20 aa, synthetic construct
  source 1..20: note = Seed: KEPPFLWMGYELHPDKWTVQ; note = HLAs: DPA10103-DPB10101 DPA10103-DPB10201 DPA10103-DPB10202 DPA10103-DPB10401 DPA10103-DPB10402 DPA10103-DPB10501 DPA10103-DPB110501 DPA10103-DPB112601 DPA10103-DPB11501 DPA10103-DPB11601 DPA10103-DPB11801 DPA10103-DPB11901 DPA10103-DPB12301 DPA10103-DPB13101 DPA10103-DPB13401 DPA10103-DPB13901 DPA10103-DPB14001 DPA10103-DPB14101 DPA10103-DPB14801 DPA10103-DPB14901 DPA10103-DPB15101 DPA10103-DPB15501 DPA10103-DPB15901 DPA10103-DPB18001 DPA10104-DPB10101 DPA10104-DPB11501 DPA10105-DPB10101 DPA10105-DPB10401 DPA10105-DPB11801 DPA10106-DPB10101 DPA10201-DPB10101 DPA10201-DPB10201 DPA10201-DPB10202 DPA10201-DPB10401 DPA10201-DPB10501 DPA10201-DPB110601 DPA10201-DPB11501 DPA10201-DPB11601 DPA10201-DPB11901 DPA10201-DPB13401 DPA10201-DPB15501 DPA10202-DPB10101 DPA10202-DPB10201 DPA10202-DPB10202 DPA10202-DPB10401 DPA10202-DPB10501 DPA10202-DPB110601 DPA10202-DPB11101 DPA10202-DPB11301 DPA10202-DPB11801 DPA10202-DPB11901 DPA10202-DPB13101 DPA10202-DPB13801 DPA10202-DPB15501 DPA10202-DPB16501; note = HLAs: DPA10301-DPB10201 DPA10301-DPB10202 DPA10301-DPB10402 DPA10301-DPB110501 DPA10301-DPB110601 DPA10301-DPB11301 DPA10301-DPB11801 DPA10301-DPB14001 DPA10301-DPB14901 DPA10301-DPB16501 DPA10301-DPB17501 DPA10301-DPB18001 DPA10401-DPB10101 DPA10401-DPB10201 DPA10401-DPB10202 DPA10401-DPB10402 DPA10401-DPB10501 DPA10401-DPB110501 DPA10401-DPB14901
KEPPCLWIGFELLPDKWTVQ

SEQ ID NO: 7334 - protein, 20 aa, synthetic construct
  source 1..20: note = Seed: KEPPFLWMGYELHPDKWTVQ; note = HLAs: DRB1_0101 DRB1_1001 DPA10103-DPB10101 DPA10103-DPB10201 DPA10103-DPB10202 DPA10103-DPB10401 DPA10103-DPB10402 DPA10103-DPB10501 DPA10103-DPB110501 DPA10103-DPB112601 DPA10103-DPB11501 DPA10103-DPB11601 DPA10103-DPB11801 DPA10103-DPB11901 DPA10103-DPB12301 DPA10103-DPB13101 DPA10103-DPB13401 DPA10103-DPB13901 DPA10103-DPB14001 DPA10103-DPB14101 DPA10103-DPB14801 DPA10103-DPB14901 DPA10103-DPB15001 DPA10103-DPB15101 DPA10103-DPB15501 DPA10103-DPB15901 DPA10103-DPB18001 DPA10104-DPB10101 DPA10104-DPB11501 DPA10105-DPB10101 DPA10105-DPB10401 DPA10105-DPB11801 DPA10105-DPB15001 DPA10106-DPB10101 DPA10201-DPB10101 DPA10201-DPB10201 DPA10201-DPB10202 DPA10201-DPB10401 DPA10201-DPB10501 DPA10201-DPB110601 DPA10201-DPB11501 DPA10201-DPB11601 DPA10201-DPB11901 DPA10201-DPB13401 DPA10201-DPB15501 DPA10202-DPB10101 DPA10202-DPB10201 DPA10202-DPB10202 DPA10202-DPB10401 DPA10202-DPB10501 DPA10202-DPB110601 DPA10202-DPB11101 DPA10202-DPB11301 DPA10202-DPB11801 DPA10202-DPB11901; note = HLAs: DPA10202-DPB13101 DPA10202-DPB13801 DPA10202-DPB15501 DPA10202-DPB16501 DPA10301-DPB10101 DPA10301-DPB10201 DPA10301-DPB10202 DPA10301-DPB10401 DPA10301-DPB10402 DPA10301-DPB110501 DPA10301-DPB110601 DPA10301-DPB11101 DPA10301-DPB11301 DPA10301-DPB11801 DPA10301-DPB12301 DPA10301-DPB13901 DPA10301-DPB14001 DPA10301-DPB14901 DPA10301-DPB15501 DPA10301-DPB16501 DPA10301-DPB17501 DPA10301-DPB18001 DPA10401-DPB10101 DPA10401-DPB10201 DPA10401-DPB10202 DPA10401-DPB10402 DPA10401-DPB10501 DPA10401-DPB110501 DPA10401-DPB14901
KEPPFLWTGIELNPDKWTVQ

SEQ ID NO: 7335 - protein, 20 aa, synthetic construct
  source 1..20: note = Seed: KEPPFLWMGYELHPDKWTVQ; note = HLAs: DRB1_0101 DRB1_1001 DPA10103-DPB10101 DPA10103-DPB10201 DPA10103-DPB10202 DPA10103-DPB10401 DPA10103-DPB10402 DPA10103-DPB10501 DPA10103-DPB110501 DPA10103-DPB112601 DPA10103-DPB11501 DPA10103-DPB11601 DPA10103-DPB11801 DPA10103-DPB11901 DPA10103-DPB12301 DPA10103-DPB13101 DPA10103-DPB13401 DPA10103-DPB13901 DPA10103-DPB14001 DPA10103-DPB14101 DPA10103-DPB14801 DPA10103-DPB14901 DPA10103-DPB15001 DPA10103-DPB15101 DPA10103-DPB15501 DPA10103-DPB15901 DPA10103-DPB18001 DPA10104-DPB10101 DPA10104-DPB11501 DPA10105-DPB10101 DPA10105-DPB10401 DPA10105-DPB11801 DPA10105-DPB15001 DPA10106-DPB10101 DPA10201-DPB10101 DPA10201-DPB10201 DPA10201-DPB10202 DPA10201-DPB10401 DPA10201-DPB10501 DPA10201-DPB110601 DPA10201-DPB11501 DPA10201-DPB11601 DPA10201-DPB11901 DPA10201-DPB13401 DPA10201-DPB15501 DPA10202-DPB10101 DPA10202-DPB10201 DPA10202-DPB10202 DPA10202-DPB10401 DPA10202-DPB10501 DPA10202-DPB110601 DPA10202-DPB11301 DPA10202-DPB11801 DPA10202-DPB11901 DPA10202-DPB13101; note = HLAs: DPA10202-DPB13801 DPA10202-DPB15501 DPA10202-DPB16501 DPA10301-DPB10101 DPA10301-DPB10201 DPA10301-DPB10202 DPA10301-DPB10401 DPA10301-DPB10402 DPA10301-DPB110501 DPA10301-DPB110601 DPA10301-DPB11101 DPA10301-DPB11301 DPA10301-DPB11801 DPA10301-DPB12301 DPA10301-DPB13901 DPA10301-DPB14001 DPA10301-DPB14901 DPA10301-DPB15501 DPA10301-DPB16501 DPA10301-DPB17501 DPA10301-DPB18001 DPA10401-DPB10101 DPA10401-DPB10201 DPA10401-DPB10202 DPA10401-DPB10402 DPA10401-DPB10501 DPA10401-DPB110501 DPA10401-DPB14901
KEPPFLWTGMELAPDKWTVQ

SEQ ID NO: 7336 - protein, 20 aa, synthetic construct
  source 1..20: note = Seed: KEPPFLWMGYELHPDKWTVQ; note = HLAs: DRB1_0101 DRB1_1001 DPA10103-DPB10101 DPA10103-DPB10201 DPA10103-DPB10202 DPA10103-DPB10401 DPA10103-DPB10402 DPA10103-DPB10501 DPA10103-DPB110501 DPA10103-DPB112601 DPA10103-DPB11501 DPA10103-DPB11601 DPA10103-DPB11801 DPA10103-DPB11901 DPA10103-DPB12301 DPA10103-DPB13101 DPA10103-DPB13401 DPA10103-DPB13901 DPA10103-DPB14001 DPA10103-DPB14101 DPA10103-DPB14801 DPA10103-DPB14901 DPA10103-DPB15001 DPA10103-DPB15101 DPA10103-DPB15501 DPA10103-DPB15901 DPA10103-DPB18001 DPA10104-DPB10101 DPA10104-DPB11501 DPA10105-DPB10101 DPA10105-DPB10401 DPA10105-DPB11801 DPA10105-DPB15001 DPA10106-DPB10101 DPA10201-DPB10101 DPA10201-DPB10201 DPA10201-DPB10202 DPA10201-DPB10401 DPA10201-DPB10501 DPA10201-DPB110601 DPA10201-DPB11501 DPA10201-DPB11601 DPA10201-DPB11901 DPA10201-DPB13401 DPA10201-DPB15501 DPA10202-DPB10101 DPA10202-DPB10201 DPA10202-DPB10202 DPA10202-DPB10401 DPA10202-DPB10501 DPA10202-DPB110601 DPA10202-DPB11101 DPA10202-DPB11301 DPA10202-DPB11801 DPA10202-DPB11901; note = HLAs: DPA10202-DPB13101 DPA10202-DPB13801 DPA10202-DPB15501 DPA10202-DPB16501 DPA10301-DPB10101 DPA10301-DPB10201 DPA10301-DPB10202 DPA10301-DPB10401 DPA10301-DPB10402 DPA10301-DPB110501 DPA10301-DPB110601 DPA10301-DPB11101 DPA10301-DPB11301 DPA10301-DPB11801 DPA10301-DPB12301 DPA10301-DPB13901 DPA10301-DPB14001 DPA10301-DPB14901 DPA10301-DPB15501 DPA10301-DPB16501 DPA10301-DPB17501 DPA10301-DPB18001 DPA10401-DPB10101 DPA10401-DPB10201 DPA10401-DPB10202 DPA10401-DPB10402 DPA10401-DPB10501 DPA10401-DPB110501 DPA10401-DPB14901
KEPPFLWAGLELTPDKWTVQ

SEQ ID NO: 7337 - protein, 14 aa, synthetic construct
  source 1..14: note = Seed: PPFLWMGYELHPDK; note = HLAs: DRB1_1001 DPA10103-DPB10201 DPA10103-DPB10202 DPA10103-DPB11501 DPA10103-DPB11601 DPA10103-DPB11901 DPA10103-DPB13401 DPA10103-DPB14001 DPA10103-DPB14101 DPA10103-DPB14801 DPA10103-DPB15001 DPA10103-DPB15901 DPA10104-DPB11501 DPA10105-DPB15001 DPA10201-DPB110601 DPA10201-DPB11501 DPA10201-DPB11601 DPA10201-DPB11901 DPA10202-DPB10101 DPA10202-DPB10201 DPA10202-DPB10202 DPA10202-DPB10401 DPA10202-DPB110601 DPA10202-DPB11901 DPA10202-DPB13101 DPA10202-DPB16501 DPA10301-DPB10201 DPA10301-DPB10202 DPA10301-DPB10401 DPA10301-DPB10402 DPA10301-DPB110501 DPA10301-DPB110601 DPA10301-DPB11801 DPA10301-DPB12301 DPA10301-DPB13901 DPA10301-DPB14001 DPA10301-DPB14901 DPA10301-DPB15501 DPA10301-DPB17501 DPA10301-DPB18001 DPA10401-DPB10201 DPA10401-DPB10202 DPA10401-DPB10402 DPA10401-DPB10501 DPA10401-DPB110501 DPA10401-DPB14901
PPFLWQGVELLPDK

SEQ ID NO: 7338 - protein, 20 aa, synthetic construct
  source 1..20: note = Seed: KEPPFLWMGYELHPDKWTVQ; note = HLAs: DPA10103-DPB10101 DPA10103-DPB10201 DPA10103-DPB10202 DPA10103-DPB10401 DPA10103-DPB10402 DPA10103-DPB10501 DPA10103-DPB110501 DPA10103-DPB112601 DPA10103-DPB11501 DPA10103-DPB11601 DPA10103-DPB11801 DPA10103-DPB11901 DPA10103-DPB12301 DPA10103-DPB13101 DPA10103-DPB13401 DPA10103-DPB13901 DPA10103-DPB14001 DPA10103-DPB14101 DPA10103-DPB14801 DPA10103-DPB14901 DPA10103-DPB15001 DPA10103-DPB15101 DPA10103-DPB15501 DPA10103-DPB15901 DPA10103-DPB18001 DPA10104-DPB10101 DPA10104-DPB11501 DPA10105-DPB10101 DPA10105-DPB10401 DPA10105-DPB11801 DPA10105-DPB15001 DPA10106-DPB10101 DPA10201-DPB10101 DPA10201-DPB10201 DPA10201-DPB10202 DPA10201-DPB10401 DPA10201-DPB10501 DPA10201-DPB110601 DPA10201-DPB11501 DPA10201-DPB11601 DPA10201-DPB11901 DPA10201-DPB13401 DPA10201-DPB15501 DPA10202-DPB10101 DPA10202-DPB10201 DPA10202-DPB10202 DPA10202-DPB10401 DPA10202-DPB10501 DPA10202-DPB110601 DPA10202-DPB11301 DPA10202-DPB11801 DPA10202-DPB11901 DPA10202-DPB13101 DPA10202-DPB13801 DPA10202-DPB15501; note = HLAs: DPA10202-DPB16501 DPA10301-DPB10101 DPA10301-DPB10201 DPA10301-DPB10202 DPA10301-DPB10401 DPA10301-DPB10402 DPA10301-DPB110501 DPA10301-DPB110601 DPA10301-DPB11301 DPA10301-DPB11801 DPA10301-DPB12301 DPA10301-DPB13901 DPA10301-DPB14001 DPA10301-DPB14901 DPA10301-DPB15501 DPA10301-DPB16501 DPA10301-DPB17501 DPA10301-DPB18001 DPA10401-DPB10101 DPA10401-DPB10201 DPA10401-DPB10202 DPA10401-DPB10402 DPA10401-DPB10501 DPA10401-DPB110501 DPA10401-DPB14901
KEPPFLWNGFELWPDKWTVQ

SEQ ID NO: 7339 - protein, 20 aa, synthetic construct
  source 1..20: note = Seed: KEPPFLWMGYELHPDKWTVQ; note = HLAs: DPA10103-DPB10101 DPA10103-DPB10201 DPA10103-DPB10202 DPA10103-DPB10401 DPA10103-DPB10402 DPA10103-DPB10501 DPA10103-DPB110501 DPA10103-DPB112601 DPA10103-DPB11501 DPA10103-DPB11601 DPA10103-DPB11801 DPA10103-DPB11901 DPA10103-DPB12301 DPA10103-DPB13101 DPA10103-DPB13401 DPA10103-DPB13901 DPA10103-DPB14001 DPA10103-DPB14101 DPA10103-DPB14801 DPA10103-DPB14901 DPA10103-DPB15001 DPA10103-DPB15101 DPA10103-DPB15501 DPA10103-DPB15901 DPA10103-DPB18001 DPA10104-DPB10101 DPA10104-DPB11501 DPA10105-DPB10101 DPA10105-DPB10401 DPA10105-DPB11801 DPA10105-DPB15001 DPA10106-DPB10101 DPA10201-DPB10101 DPA10201-DPB10201 DPA10201-DPB10202 DPA10201-DPB10401 DPA10201-DPB10501 DPA10201-DPB110601 DPA10201-DPB11501 DPA10201-DPB11601 DPA10201-DPB11901 DPA10201-DPB13401 DPA10201-DPB15501 DPA10202-DPB10101 DPA10202-DPB10201 DPA10202-DPB10202 DPA10202-DPB10401 DPA10202-DPB10501 DPA10202-DPB110601 DPA10202-DPB11101 DPA10202-DPB11301 DPA10202-DPB11801 DPA10202-DPB11901 DPA10202-DPB13101 DPA10202-DPB13801; note = HLAs: DPA10202-DPB15501 DPA10202-DPB16501 DPA10301-DPB10101 DPA10301-DPB10201 DPA10301-DPB10202 DPA10301-DPB10401 DPA10301-DPB10402 DPA10301-DPB110501 DPA10301-DPB110601 DPA10301-DPB11101 DPA10301-DPB11301 DPA10301-DPB11801 DPA10301-DPB12301 DPA10301-DPB13901 DPA10301-DPB14001 DPA10301-DPB14901 DPA10301-DPB15501 DPA10301-DPB16501 DPA10301-DPB17501 DPA10301-DPB18001 DPA10401-DPB10101 DPA10401-DPB10201 DPA10401-DPB10202 DPA10401-DPB10402 DPA10401-DPB10501 DPA10401-DPB110501 DPA10401-DPB14901
KEPPFLWDGFELNPDKWTVQ

SEQ ID NO: 7340 - protein, 14 aa, synthetic construct
  source 1..14: note = Seed: PPFLWMGYELHPDK; note = HLAs: DPA10103-DPB10101 DPA10103-DPB10201 DPA10103-DPB10202 DPA10103-DPB10401 DPA10103-DPB112601 DPA10103-DPB11501 DPA10103-DPB11601 DPA10103-DPB11901 DPA10103-DPB12301 DPA10103-DPB13101 DPA10103-DPB13401 DPA10103-DPB13901 DPA10103-DPB14001 DPA10103-DPB14101 DPA10103-DPB14801 DPA10103-DPB15001 DPA10103-DPB15901 DPA10104-DPB10101 DPA10104-DPB11501 DPA10105-DPB10101 DPA10105-DPB10401 DPA10105-DPB15001 DPA10106-DPB10101 DPA10201-DPB10101 DPA10201-DPB110601 DPA10201-DPB11501 DPA10201-DPB11601 DPA10201-DPB11901 DPA10202-DPB10101 DPA10202-DPB10201 DPA10202-DPB10202 DPA10202-DPB10401 DPA10202-DPB110601 DPA10202-DPB11901 DPA10202-DPB13101 DPA10202-DPB16501 DPA10301-DPB10101 DPA10301-DPB10201 DPA10301-DPB10202 DPA10301-DPB10401 DPA10301-DPB10402 DPA10301-DPB110501 DPA10301-DPB110601 DPA10301-DPB11801 DPA10301-DPB12301 DPA10301-DPB13901 DPA10301-DPB14001 DPA10301-DPB14901 DPA10301-DPB15501 DPA10301-DPB16501 DPA10301-DPB17501 DPA10301-DPB18001 DPA10401-DPB10101 DPA10401-DPB10201; note = HLAs: DPA10401-DPB10202 DPA10401-DPB10402 DPA10401-DPB10501 DPA10401-DPB110501 DPA10401-DPB14901
PPFLWWGWELVPDK

SEQ ID NO: 7341 - protein, 20 aa, synthetic construct
  source 1..20: note = Seed: KEPPFLWMGYELHPDKWTVQ; note = HLAs: DRB1_0101 DPA10103-DPB10201 DPA10103-DPB10202 DPA10103-DPB10401 DPA10103-DPB10402 DPA10103-DPB10501 DPA10103-DPB110501 DPA10103-DPB112601 DPA10103-DPB11501 DPA10103-DPB11601 DPA10103-DPB11801 DPA10103-DPB11901 DPA10103-DPB12301 DPA10103-DPB13401 DPA10103-DPB13901 DPA10103-DPB14001 DPA10103-DPB14101 DPA10103-DPB14801 DPA10103-DPB14901 DPA10103-DPB15101 DPA10103-DPB15501 DPA10103-DPB15901 DPA10103-DPB18001 DPA10104-DPB11501 DPA10105-DPB10401 DPA10105-DPB11801 DPA10106-DPB10101 DPA10201-DPB10101 DPA10201-DPB10201 DPA10201-DPB10202 DPA10201-DPB10401 DPA10201-DPB10501 DPA10201-DPB110601 DPA10201-DPB11501 DPA10201-DPB11601 DPA10201-DPB11901 DPA10201-DPB13401 DPA10201-DPB15501 DPA10202-DPB10201 DPA10202-DPB10202 DPA10202-DPB10501 DPA10202-DPB110601 DPA10202-DPB11301 DPA10202-DPB11801 DPA10202-DPB11901 DPA10202-DPB13101 DPA10202-DPB13801 DPA10202-DPB15501 DPA10301-DPB10201 DPA10301-DPB10202 DPA10301-DPB10401 DPA10301-DPB10402 DPA10301-DPB110501 DPA10301-DPB110601 DPA10301-DPB11301; note = HLAs: DPA10301-DPB11801 DPA10301-DPB12301 DPA10301-DPB13901 DPA10301-DPB14001 DPA10301-DPB14901 DPA10301-DPB15501 DPA10301-DPB17501 DPA10301-DPB18001 DPA10401-DPB10201 DPA10401-DPB10202 DPA10401-DPB10402 DPA10401-DPB10501 DPA10401-DPB110501 DPA10401-DPB14901
KEPPFLWYGIELIPDKWTVQ

SEQ ID NO: 7342 - protein, 20 aa, synthetic construct
  source 1..20: note = Seed: KEPPFLWMGYELHPDKWTVQ; note = HLAs: DPA10103-DPB10101 DPA10103-DPB10201 DPA10103-DPB10202 DPA10103-DPB10401 DPA10103-DPB10402 DPA10103-DPB10501 DPA10103-DPB110501 DPA10103-DPB112601 DPA10103-DPB11501 DPA10103-DPB11601 DPA10103-DPB11801 DPA10103-DPB11901 DPA10103-DPB12301 DPA10103-DPB13101 DPA10103-DPB13401 DPA10103-DPB13901 DPA10103-DPB14001 DPA10103-DPB14101 DPA10103-DPB14801 DPA10103-DPB14901 DPA10103-DPB15001 DPA10103-DPB15101 DPA10103-DPB15501 DPA10103-DPB15901 DPA10103-DPB18001 DPA10104-DPB10101 DPA10104-DPB11501 DPA10105-DPB10101 DPA10105-DPB10401 DPA10105-DPB11801 DPA10105-DPB15001 DPA10106-DPB10101 DPA10201-DPB10101 DPA10201-DPB10201 DPA10201-DPB10202 DPA10201-DPB10401 DPA10201-DPB10501 DPA10201-DPB110601 DPA10201-DPB11501 DPA10201-DPB11601 DPA10201-DPB11901 DPA10201-DPB13401 DPA10201-DPB15501 DPA10202-DPB10101 DPA10202-DPB10201 DPA10202-DPB10202 DPA10202-DPB10401 DPA10202-DPB10501 DPA10202-DPB110601 DPA10202-DPB11101 DPA10202-DPB11301 DPA10202-DPB11801 DPA10202-DPB11901 DPA10202-DPB13101 DPA10202-DPB13801; note = HLAs: DPA10202-DPB15501 DPA10202-DPB16501 DPA10301-DPB10101 DPA10301-DPB10201 DPA10301-DPB10202 DPA10301-DPB10401 DPA10301-DPB10402 DPA10301-DPB110501 DPA10301-DPB110601 DPA10301-DPB11101 DPA10301-DPB11301 DPA10301-DPB11801 DPA10301-DPB12301 DPA10301-DPB13901 DPA10301-DPB14001 DPA10301-DPB14901 DPA10301-DPB15501 DPA10301-DPB16501 DPA10301-DPB17501 DPA10301-DPB18001 DPA10401-DPB10101 DPA10401-DPB10201 DPA10401-DPB10202 DPA10401-DPB10402 DPA10401-DPB10501 DPA10401-DPB110501 DPA10401-DPB14901
KEPPYLWEGWELLPDKWTVQ

SEQ ID NO: 7343 - protein, 20 aa, synthetic construct
  source 1..20: note = Seed: KEPPFLWMGYELHPDKWTVQ; note = HLAs: DRB1_0101 DRB1_0405 DRB1_1001 DPA10103-DPB10202 DPA10103-DPB10402 DPA10103-DPB110501 DPA10103-DPB11501 DPA10103-DPB11801 DPA10103-DPB13401 DPA10103-DPB14001 DPA10103-DPB14901 DPA10103-DPB15101 DPA10103-DPB15901 DPA10103-DPB18001 DPA10104-DPB11501 DPA10105-DPB11801 DPA10106-DPB10101 DPA10201-DPB10101 DPA10201-DPB10201 DPA10201-DPB10202 DPA10201-DPB10401 DPA10201-DPB10501 DPA10201-DPB110601 DPA10201-DPB11501 DPA10201-DPB11601 DPA10201-DPB11901 DPA10201-DPB13401 DPA10201-DPB15501 DPA10202-DPB10101 DPA10202-DPB10201 DPA10202-DPB10202 DPA10202-DPB10401 DPA10202-DPB10501 DPA10202-DPB110601 DPA10202-DPB11101 DPA10202-DPB11301 DPA10202-DPB11801 DPA10202-DPB11901 DPA10202-DPB13101 DPA10202-DPB13801 DPA10202-DPB15501 DPA10202-DPB16501 DPA10301-DPB10201 DPA10301-DPB10202 DPA10301-DPB10401 DPA10301-DPB110601 DPA10301-DPB11101 DPA10301-DPB11301 DPA10301-DPB11801 DPA10301-DPB12301 DPA10301-DPB13901 DPA10301-DPB14001 DPA10301-DPB15501 DPA10301-DPB17501 DPA10401-DPB10201 DPA10401-DPB10202; note = HLAs: DPA10401-DPB10402 DPA10401-DPB110501 DPA10401-DPB14901
KEPPFLWFGSELLPDKWTVQ

SEQ ID NO: 7344 - protein, 20 aa, synthetic construct
  source 1..20: note = Seed: KEPPFLWMGYELHPDKWTVQ; note = HLAs: DRB1_0101 DRB1_1001 DPA10103-DPB10201 DPA10103-DPB10202 DPA10103-DPB10401 DPA10103-DPB10402 DPA10103-DPB10501 DPA10103-DPB110501 DPA10103-DPB112601 DPA10103-DPB11501 DPA10103-DPB11601 DPA10103-DPB11801 DPA10103-DPB11901 DPA10103-DPB12301 DPA10103-DPB13401 DPA10103-DPB13901 DPA10103-DPB14001 DPA10103-DPB14101 DPA10103-DPB14801 DPA10103-DPB14901 DPA10103-DPB15101 DPA10103-DPB15501 DPA10103-DPB15901 DPA10103-DPB18001 DPA10104-DPB11501 DPA10105-DPB10401 DPA10105-DPB11801 DPA10106-DPB10101 DPA10201-DPB10101 DPA10201-DPB10201 DPA10201-DPB10202 DPA10201-DPB10401 DPA10201-DPB10501 DPA10201-DPB110601 DPA10201-DPB11501 DPA10201-DPB11601 DPA10201-DPB11901 DPA10201-DPB13401 DPA10201-DPB15501 DPA10202-DPB10101 DPA10202-DPB10201 DPA10202-DPB10202 DPA10202-DPB10501 DPA10202-DPB110601 DPA10202-DPB11801 DPA10202-DPB11901 DPA10202-DPB13101 DPA10202-DPB13801 DPA10202-DPB15501 DPA10202-DPB16501 DPA10301-DPB10201 DPA10301-DPB10202 DPA10301-DPB10401 DPA10301-DPB10402 DPA10301-DPB110501; note = HLAs: DPA10301-DPB110601 DPA10301-DPB11801 DPA10301-DPB12301 DPA10301-DPB13901 DPA10301-DPB14001 DPA10301-DPB14901 DPA10301-DPB18001 DPA10401-DPB10201 DPA10401-DPB10202 DPA10401-DPB10402 DPA10401-DPB110501 DPA10401-DPB14901
KEPPYLWFGIELLPDKWTVQ

SEQ ID NO: 7345 - protein, 20 aa, synthetic construct
  source 1..20: note = Seed: KEPPFLWMGYELHPDKWTVQ; note = HLAs: DRB1_0101 DRB1_1001 DPA10103-DPB10101 DPA10103-DPB10201 DPA10103-DPB10202 DPA10103-DPB10401 DPA10103-DPB10402 DPA10103-DPB10501 DPA10103-DPB110501 DPA10103-DPB112601 DPA10103-DPB11501 DPA10103-DPB11601 DPA10103-DPB11801 DPA10103-DPB11901 DPA10103-DPB12301 DPA10103-DPB13101 DPA10103-DPB13401 DPA10103-DPB13901 DPA10103-DPB14001 DPA10103-DPB14101 DPA10103-DPB14801 DPA10103-DPB14901 DPA10103-DPB15001 DPA10103-DPB15101 DPA10103-DPB15501 DPA10103-DPB15901 DPA10103-DPB18001 DPA10104-DPB10101 DPA10104-DPB11501 DPA10105-DPB10101 DPA10105-DPB10401 DPA10105-DPB11801 DPA10105-DPB15001 DPA10106-DPB10101 DPA10201-DPB10101 DPA10201-DPB10201 DPA10201-DPB10202 DPA10201-DPB10401 DPA10201-DPB10501 DPA10201-DPB110601 DPA10201-DPB11501 DPA10201-DPB11601 DPA10201-DPB11901 DPA10201-DPB13401 DPA10201-DPB15501 DPA10202-DPB10101 DPA10202-DPB10201 DPA10202-DPB10202 DPA10202-DPB10401 DPA10202-DPB10501 DPA10202-DPB110601 DPA10202-DPB11101 DPA10202-DPB11301 DPA10202-DPB11801 DPA10202-DPB11901; note = HLAs: DPA10202-DPB13101 DPA10202-DPB13801 DPA10202-DPB15501 DPA10202-DPB16501 DPA10301-DPB10101 DPA10301-DPB10201 DPA10301-DPB10202 DPA10301-DPB10401 DPA10301-DPB10402 DPA10301-DPB110501 DPA10301-DPB110601 DPA10301-DPB11101 DPA10301-DPB11301 DPA10301-DPB11801 DPA10301-DPB12301 DPA10301-DPB13901 DPA10301-DPB14001 DPA10301-DPB14901 DPA10301-DPB15501 DPA10301-DPB16501 DPA10301-DPB17501 DPA10301-DPB18001 DPA10401-DPB10101 DPA10401-DPB10201 DPA10401-DPB10202 DPA10401-DPB10402 DPA10401-DPB10501 DPA10401-DPB110501 DPA10401-DPB14901
KEPPYLWSGIELVPDKWTVQ

SEQ ID NO: 7346 - protein, 14 aa, synthetic construct
  source 1..14: note = Seed: PPFLWMGYELHPDK; note = HLAs: DPA10103-DPB10101 DPA10103-DPB10201 DPA10103-DPB10202 DPA10103-DPB10401 DPA10103-DPB112601 DPA10103-DPB11501 DPA10103-DPB11601 DPA10103-DPB11901 DPA10103-DPB12301 DPA10103-DPB13101 DPA10103-DPB13401 DPA10103-DPB13901 DPA10103-DPB14001 DPA10103-DPB14101 DPA10103-DPB14801 DPA10103-DPB15001 DPA10103-DPB15901 DPA10104-DPB10101 DPA10104-DPB11501 DPA10105-DPB10101 DPA10105-DPB10401 DPA10105-DPB15001 DPA10106-DPB10101 DPA10201-DPB10101 DPA10201-DPB110601 DPA10201-DPB11501 DPA10201-DPB11601 DPA10201-DPB11901 DPA10202-DPB10101 DPA10202-DPB10201 DPA10202-DPB10202 DPA10202-DPB10401 DPA10202-DPB110601 DPA10202-DPB11901 DPA10202-DPB13101 DPA10202-DPB16501 DPA10301-DPB10101 DPA10301-DPB10201 DPA10301-DPB10202 DPA10301-DPB10401 DPA10301-DPB10402 DPA10301-DPB110501 DPA10301-DPB110601 DPA10301-DPB11801 DPA10301-DPB12301 DPA10301-DPB13901 DPA10301-DPB14001 DPA10301-DPB14901 DPA10301-DPB15501 DPA10301-DPB16501 DPA10301-DPB17501 DPA10301-DPB18001 DPA10401-DPB10101 DPA10401-DPB10201; note = HLAs: DPA10401-DPB10202 DPA10401-DPB10402 DPA10401-DPB10501 DPA10401-DPB110501 DPA10401-DPB14901
PPILWHGFELYPDK

SEQ ID NO: 7347 - protein, 14 aa, synthetic construct
  source 1..14: note = Seed: PPFLWMGYELHPDK; note = HLAs: DPA10103-DPB10101 DPA10103-DPB10201 DPA10103-DPB10202 DPA10103-DPB10401 DPA10103-DPB112601 DPA10103-DPB11501 DPA10103-DPB11601 DPA10103-DPB11901 DPA10103-DPB12301 DPA10103-DPB13101 DPA10103-DPB13401 DPA10103-DPB13901 DPA10103-DPB14001 DPA10103-DPB14101 DPA10103-DPB14801 DPA10103-DPB15001 DPA10103-DPB15901 DPA10104-DPB10101 DPA10104-DPB11501 DPA10105-DPB10101 DPA10105-DPB10401 DPA10105-DPB15001 DPA10106-DPB10101 DPA10201-DPB10101 DPA10201-DPB110601 DPA10201-DPB11601 DPA10201-DPB11901 DPA10202-DPB10101 DPA10202-DPB10201 DPA10202-DPB10202 DPA10202-DPB10401 DPA10202-DPB110601 DPA10202-DPB11901 DPA10202-DPB13101 DPA10202-DPB16501 DPA10301-DPB10101 DPA10301-DPB10201 DPA10301-DPB10202 DPA10301-DPB10402 DPA10301-DPB110501 DPA10301-DPB110601 DPA10301-DPB11801 DPA10301-DPB14901 DPA10301-DPB15501 DPA10301-DPB16501 DPA10301-DPB17501 DPA10301-DPB18001 DPA10401-DPB10101 DPA10401-DPB10201 DPA10401-DPB10202 DPA10401-DPB10402 DPA10401-DPB10501 DPA10401-DPB110501 DPA10401-DPB14901
PPRLWIGFELVPDK

SEQ ID NO: 7348 - protein, 20 aa, synthetic construct
  source 1..20: note = Seed: KEPPFLWMGYELHPDKWTVQ; note = HLAs: DRB1_0101 DPA10103-DPB10101 DPA10103-DPB10201 DPA10103-DPB10202 DPA10103-DPB10401 DPA10103-DPB112601 DPA10103-DPB11501 DPA10103-DPB11601 DPA10103-DPB11801 DPA10103-DPB11901 DPA10103-DPB12301 DPA10103-DPB13101 DPA10103-DPB13401 DPA10103-DPB13901 DPA10103-DPB14001 DPA10103-DPB14101 DPA10103-DPB14801 DPA10104-DPB10101 DPA10104-DPB11501 DPA10105-DPB10101 DPA10105-DPB10401 DPA10105-DPB11801 DPA10106-DPB10101 DPA10201-DPB10101 DPA10201-DPB10201 DPA10201-DPB10202 DPA10201-DPB10401 DPA10201-DPB110601 DPA10201-DPB11501 DPA10201-DPB11601 DPA10201-DPB11901 DPA10201-DPB13401 DPA10202-DPB10101 DPA10202-DPB10201 DPA10202-DPB10202 DPA10202-DPB10501 DPA10202-DPB110601 DPA10202-DPB11801 DPA10202-DPB11901 DPA10202-DPB13101 DPA10202-DPB13801 DPA10202-DPB16501 DPA10301-DPB10101 DPA10301-DPB10201 DPA10301-DPB10202 DPA10301-DPB10401 DPA10301-DPB10402 DPA10301-DPB110501 DPA10301-DPB110601 DPA10301-DPB11101 DPA10301-DPB11301 DPA10301-DPB11801 DPA10301-DPB12301 DPA10301-DPB13901 DPA10301-DPB14001; note = HLAs: DPA10301-DPB14901 DPA10301-DPB15501 DPA10301-DPB16501 DPA10301-DPB17501 DPA10301-DPB18001 DPA10401-DPB10101 DPA10401-DPB10201 DPA10401-DPB10202 DPA10401-DPB10402 DPA10401-DPB10501 DPA10401-DPB110501 DPA10401-DPB14901
KEPPMLWTGIELLPDKWTVQ

SEQ ID NO: 7349 - protein, 20 aa, synthetic construct
  source 1..20: note = Seed: KEPPFLWMGYELHPDKWTVQ; note = HLAs: DPA10103-DPB10101 DPA10103-DPB10201 DPA10103-DPB10202 DPA10103-DPB10401 DPA10103-DPB10402 DPA10103-DPB10501 DPA10103-DPB110501 DPA10103-DPB112601 DPA10103-DPB11501 DPA10103-DPB11601 DPA10103-DPB11801 DPA10103-DPB11901 DPA10103-DPB12301 DPA10103-DPB13101 DPA10103-DPB13401 DPA10103-DPB13901 DPA10103-DPB14001 DPA10103-DPB14101 DPA10103-DPB14801 DPA10103-DPB14901 DPA10103-DPB15001 DPA10103-DPB15101 DPA10103-DPB15501 DPA10103-DPB15901 DPA10103-DPB18001 DPA10104-DPB10101 DPA10104-DPB11501 DPA10105-DPB10101 DPA10105-DPB10401 DPA10105-DPB11801 DPA10105-DPB15001 DPA10106-DPB10101 DPA10201-DPB10101 DPA10201-DPB10201 DPA10201-DPB10202 DPA10201-DPB10401 DPA10201-DPB10501 DPA10201-DPB110601 DPA10201-DPB11501 DPA10201-DPB11601 DPA10201-DPB11901 DPA10201-DPB13401 DPA10201-DPB15501 DPA10202-DPB10101 DPA10202-DPB10201 DPA10202-DPB10202 DPA10202-DPB10401 DPA10202-DPB10501 DPA10202-DPB110601 DPA10202-DPB11301 DPA10202-DPB11801 DPA10202-DPB11901 DPA10202-DPB13101 DPA10202-DPB13801 DPA10202-DPB15501; note = HLAs: DPA10202-DPB16501 DPA10301-DPB10101 DPA10301-DPB10201 DPA10301-DPB10202 DPA10301-DPB10401 DPA10301-DPB10402 DPA10301-DPB110501 DPA10301-DPB110601 DPA10301-DPB11101 DPA10301-DPB11301 DPA10301-DPB11801 DPA10301-DPB12301 DPA10301-DPB13901 DPA10301-DPB14001 DPA10301-DPB14901 DPA10301-DPB15501 DPA10301-DPB16501 DPA10301-DPB17501 DPA10301-DPB18001 DPA10401-DPB10101 DPA10401-DPB10201 DPA10401-DPB10202 DPA10401-DPB10402 DPA10401-DPB10501 DPA10401-DPB110501 DPA10401-DPB14901
KEPPLLWHGLELIPDKWTVQ

SEQ ID NO: 7350 - protein, 20 aa, synthetic construct
  source 1..20: note = Seed: KEPPFLWMGYELHPDKWTVQ; note = HLAs: DRB1_0101 DRB1_1001 DPA10103-DPB10101 DPA10103-DPB10201 DPA10103-DPB10202 DPA10103-DPB10401 DPA10103-DPB10402 DPA10103-DPB10501 DPA10103-DPB110501 DPA10103-DPB112601 DPA10103-DPB11501 DPA10103-DPB11601 DPA10103-DPB11801 DPA10103-DPB11901 DPA10103-DPB12301 DPA10103-DPB13101 DPA10103-DPB13401 DPA10103-DPB13901 DPA10103-DPB14001 DPA10103-DPB14101 DPA10103-DPB14801 DPA10103-DPB14901 DPA10103-DPB15001 DPA10103-DPB15101 DPA10103-DPB15501 DPA10103-DPB15901 DPA10103-DPB18001 DPA10104-DPB10101 DPA10104-DPB11501 DPA10105-DPB10101 DPA10105-DPB10401 DPA10105-DPB11801 DPA10105-DPB15001 DPA10106-DPB10101 DPA10201-DPB10101 DPA10201-DPB10201 DPA10201-DPB10202 DPA10201-DPB10401 DPA10201-DPB10501 DPA10201-DPB110601 DPA10201-DPB11501 DPA10201-DPB11601 DPA10201-DPB11901 DPA10201-DPB13401 DPA10202-DPB10101 DPA10202-DPB10201 DPA10202-DPB10202 DPA10202-DPB10401 DPA10202-DPB10501 DPA10202-DPB110601 DPA10202-DPB11301 DPA10202-DPB11801 DPA10202-DPB11901 DPA10202-DPB13101 DPA10202-DPB13801; note = HLAs: DPA10202-DPB15501 DPA10202-DPB16501 DPA10301-DPB10101 DPA10301-DPB10201 DPA10301-DPB10202 DPA10301-DPB10401 DPA10301-DPB10402 DPA10301-DPB110501 DPA10301-DPB110601 DPA10301-DPB11101 DPA10301-DPB11301 DPA10301-DPB11801 DPA10301-DPB12301 DPA10301-DPB13901 DPA10301-DPB14001 DPA10301-DPB14901 DPA10301-DPB15501 DPA10301-DPB16501 DPA10301-DPB17501 DPA10301-DPB18001 DPA10401-DPB10101 DPA10401-DPB10201 DPA10401-DPB10202 DPA10401-DPB10402 DPA10401-DPB10501 DPA10401-DPB110501 DPA10401-DPB14901
KEPPFLWEGLELAPDKWTVQ

SEQ ID NO: 7351 - protein, 20 aa, synthetic construct
  source 1..20: note = Seed: KEPPFLWMGYELHPDKWTVQ; note = HLAs: DPA10103-DPB10101 DPA10103-DPB10201 DPA10103-DPB10202 DPA10103-DPB10401 DPA10103-DPB10402 DPA10103-DPB10501 DPA10103-DPB110501 DPA10103-DPB112601 DPA10103-DPB11501 DPA10103-DPB11601 DPA10103-DPB11801 DPA10103-DPB11901 DPA10103-DPB12301 DPA10103-DPB13101 DPA10103-DPB13401 DPA10103-DPB13901 DPA10103-DPB14001 DPA10103-DPB14101 DPA10103-DPB14801 DPA10103-DPB14901 DPA10103-DPB15001 DPA10103-DPB15101 DPA10103-DPB15501 DPA10103-DPB15901 DPA10103-DPB18001 DPA10104-DPB10101 DPA10104-DPB11501 DPA10105-DPB10101 DPA10105-DPB10401 DPA10105-DPB11801 DPA10105-DPB15001 DPA10106-DPB10101 DPA10201-DPB10101 DPA10201-DPB10201 DPA10201-DPB10202 DPA10201-DPB10401 DPA10201-DPB10501 DPA10201-DPB110601 DPA10201-DPB11501 DPA10201-DPB11601 DPA10201-DPB11901 DPA10201-DPB13401 DPA10201-DPB15501 DPA10202-DPB10101 DPA10202-DPB10201 DPA10202-DPB10202 DPA10202-DPB10401 DPA10202-DPB10501 DPA10202-DPB110601 DPA10202-DPB11301 DPA10202-DPB11801 DPA10202-DPB11901 DPA10202-DPB13101 DPA10202-DPB13801 DPA10202-DPB15501; note = HLAs: DPA10202-DPB16501 DPA10301-DPB10101 DPA10301-DPB10201 DPA10301-DPB10202 DPA10301-DPB10401 DPA10301-DPB10402 DPA10301-DPB110501 DPA10301-DPB110601 DPA10301-DPB11301 DPA10301-DPB11801 DPA10301-DPB12301 DPA10301-DPB13901 DPA10301-DPB14001 DPA10301-DPB14901 DPA10301-DPB16501 DPA10301-DPB17501 DPA10301-DPB18001 DPA10401-DPB10101 DPA10401-DPB10201 DPA10401-DPB10202 DPA10401-DPB10402 DPA10401-DPB10501 DPA10401-DPB110501 DPA10401-DPB14901
KEPPVLWEGFELAPDKWTVQ

SEQ ID NO: 7352 - protein, 20 aa, synthetic construct
  source 1..20: note = Seed: KEPPFLWMGYELHPDKWTVQ; note = HLAs: DRB1_0101 DRB1_1001 DPA10103-DPB10101 DPA10103-DPB10201 DPA10103-DPB10202 DPA10103-DPB10401 DPA10103-DPB10402 DPA10103-DPB10501 DPA10103-DPB110501 DPA10103-DPB112601 DPA10103-DPB11501 DPA10103-DPB11601 DPA10103-DPB11801 DPA10103-DPB11901 DPA10103-DPB12301 DPA10103-DPB13101 DPA10103-DPB13401 DPA10103-DPB13901 DPA10103-DPB14001 DPA10103-DPB14101 DPA10103-DPB14801 DPA10103-DPB14901 DPA10103-DPB15001 DPA10103-DPB15101 DPA10103-DPB15501 DPA10103-DPB15901 DPA10103-DPB18001 DPA10104-DPB10101 DPA10104-DPB11501 DPA10105-DPB10101 DPA10105-DPB10401 DPA10105-DPB11801 DPA10105-DPB15001 DPA10106-DPB10101 DPA10201-DPB10101 DPA10201-DPB10201 DPA10201-DPB10202 DPA10201-DPB10501 DPA10201-DPB110601 DPA10201-DPB11501 DPA10201-DPB11601 DPA10201-DPB11901 DPA10201-DPB15501 DPA10202-DPB10101 DPA10202-DPB10201 DPA10202-DPB10202 DPA10202-DPB10501 DPA10202-DPB110601 DPA10202-DPB11101 DPA10202-DPB11301 DPA10202-DPB11801 DPA10202-DPB11901 DPA10202-DPB13101 DPA10202-DPB13801 DPA10202-DPB15501; note = HLAs: DPA10202-DPB16501 DPA10301-DPB10101 DPA10301-DPB10201 DPA10301-DPB10202 DPA10301-DPB10401 DPA10301-DPB10402 DPA10301-DPB110501 DPA10301-DPB110601 DPA10301-DPB11101 DPA10301-DPB11301 DPA10301-DPB11801 DPA10301-DPB12301 DPA10301-DPB13901 DPA10301-DPB14001 DPA10301-DPB14901 DPA10301-DPB15501 DPA10301-DPB16501 DPA10301-DPB17501 DPA10301-DPB18001 DPA10401-DPB10101 DPA10401-DPB10201 DPA10401-DPB10202 DPA10401-DPB10402 DPA10401-DPB10501 DPA10401-DPB110501 DPA10401-DPB14901
KEPPFLWIGIELNPDKWTVQ

SEQ ID NO: 7353 - protein, 20 aa, synthetic construct
  source 1..20: note = Seed: KEPPFLWMGYELHPDKWTVQ; note = HLAs: DRB1_0101 DRB1_0405 DRB1_1001 DPA10103-DPB10101 DPA10103-DPB10201 DPA10103-DPB10202 DPA10103-DPB10401 DPA10103-DPB10402 DPA10103-DPB10501 DPA10103-DPB110501 DPA10103-DPB112601 DPA10103-DPB11501 DPA10103-DPB11601 DPA10103-DPB11801 DPA10103-DPB11901 DPA10103-DPB12301 DPA10103-DPB13101 DPA10103-DPB13401 DPA10103-DPB13901 DPA10103-DPB14001 DPA10103-DPB14101 DPA10103-DPB14801 DPA10103-DPB14901 DPA10103-DPB15001 DPA10103-DPB15101 DPA10103-DPB15501 DPA10103-DPB15901 DPA10103-DPB18001 DPA10104-DPB10101 DPA10104-DPB11501 DPA10105-DPB10101 DPA10105-DPB10401 DPA10105-DPB11801 DPA10105-DPB15001 DPA10106-DPB10101 DPA10201-DPB10101 DPA10201-DPB10201 DPA10201-DPB10202 DPA10201-DPB10401 DPA10201-DPB10501 DPA10201-DPB110601 DPA10201-DPB11501 DPA10201-DPB11601 DPA10201-DPB11901 DPA10201-DPB13401 DPA10201-DPB15501 DPA10202-DPB10101 DPA10202-DPB10201 DPA10202-DPB10202 DPA10202-DPB10501 DPA10202-DPB110601 DPA10202-DPB11101 DPA10202-DPB11301 DPA10202-DPB11801 DPA10202-DPB11901 DPA10202-DPB13101; note = HLAs: DPA10202-DPB13801 DPA10202-DPB15501 DPA10202-DPB16501 DPA10301-DPB10101 DPA10301-DPB10201 DPA10301-DPB10202 DPA10301-DPB10401 DPA10301-DPB10402 DPA10301-DPB110501 DPA10301-DPB110601 DPA10301-DPB11101 DPA10301-DPB11301 DPA10301-DPB11801 DPA10301-DPB12301 DPA10301-DPB13901 DPA10301-DPB14001 DPA10301-DPB14901 DPA10301-DPB15501 DPA10301-DPB16501 DPA10301-DPB17501 DPA10301-DPB18001 DPA10401-DPB10101 DPA10401-DPB10201 DPA10401-DPB10202 DPA10401-DPB10402 DPA10401-DPB10501 DPA10401-DPB110501 DPA10401-DPB14901
KEPPFLWQGIELMPDKWTVQ

SEQ ID NO: 7354 - protein, 14 aa, synthetic construct
  source 1..14: note = Seed: PPFLWMGYELHPDK; note = HLAs: DRB1_1001 DPA10103-DPB10101 DPA10103-DPB10201 DPA10103-DPB10202 DPA10103-DPB10401 DPA10103-DPB112601 DPA10103-DPB11501 DPA10103-DPB11601 DPA10103-DPB11901 DPA10103-DPB12301 DPA10103-DPB13101 DPA10103-DPB13401 DPA10103-DPB13901 DPA10103-DPB14001 DPA10103-DPB14101 DPA10103-DPB14801 DPA10103-DPB15001 DPA10103-DPB15901 DPA10104-DPB10101 DPA10104-DPB11501 DPA10105-DPB10101 DPA10105-DPB10401 DPA10105-DPB15001 DPA10106-DPB10101 DPA10201-DPB10101 DPA10201-DPB110601 DPA10201-DPB11501 DPA10201-DPB11601 DPA10201-DPB11901 DPA10202-DPB10101 DPA10202-DPB10201 DPA10202-DPB10202 DPA10202-DPB10401 DPA10202-DPB110601 DPA10202-DPB11901 DPA10202-DPB13101 DPA10202-DPB16501 DPA10301-DPB10101 DPA10301-DPB10201 DPA10301-DPB10202 DPA10301-DPB10401 DPA10301-DPB10402 DPA10301-DPB110501 DPA10301-DPB110601 DPA10301-DPB11801 DPA10301-DPB12301 DPA10301-DPB13901 DPA10301-DPB14001 DPA10301-DPB14901 DPA10301-DPB15501 DPA10301-DPB16501 DPA10301-DPB17501 DPA10301-DPB18001 DPA10401-DPB10101 DPA10401-DPB10201; note = HLAs: DPA10401-DPB10202 DPA10401-DPB10402 DPA10401-DPB10501 DPA10401-DPB110501 DPA10401-DPB14901
PPFLWCGFELSPDK

SEQ ID NO: 7355 - protein, 20 aa, synthetic construct
  source 1..20: note = Seed: KEPPFLWMGYELHPDKWTVQ; note = HLAs: DRB1_1001 DPA10103-DPB10101 DPA10103-DPB10201 DPA10103-DPB10202 DPA10103-DPB10401 DPA10103-DPB10402 DPA10103-DPB10501 DPA10103-DPB110501 DPA10103-DPB112601 DPA10103-DPB11501 DPA10103-DPB11601 DPA10103-DPB11801 DPA10103-DPB11901 DPA10103-DPB12301 DPA10103-DPB13101 DPA10103-DPB13401 DPA10103-DPB13901 DPA10103-DPB14001 DPA10103-DPB14101 DPA10103-DPB14801 DPA10103-DPB14901 DPA10103-DPB15001 DPA10103-DPB15101 DPA10103-DPB15501 DPA10103-DPB15901 DPA10103-DPB18001 DPA10104-DPB10101 DPA10104-DPB11501 DPA10105-DPB10101 DPA10105-DPB10401 DPA10105-DPB11801 DPA10105-DPB15001 DPA10106-DPB10101 DPA10201-DPB10101 DPA10201-DPB10201 DPA10201-DPB10202 DPA10201-DPB10401 DPA10201-DPB10501 DPA10201-DPB110601 DPA10201-DPB11501 DPA10201-DPB11601 DPA10201-DPB11901 DPA10201-DPB13401 DPA10201-DPB15501 DPA10202-DPB10101 DPA10202-DPB10201 DPA10202-DPB10202 DPA10202-DPB10401 DPA10202-DPB10501 DPA10202-DPB110601 DPA10202-DPB11301 DPA10202-DPB11801 DPA10202-DPB11901 DPA10202-DPB13101 DPA10202-DPB13801; note = HLAs: DPA10202-DPB15501 DPA10202-DPB16501 DPA10301-DPB10101 DPA10301-DPB10201 DPA10301-DPB10202 DPA10301-DPB10401 DPA10301-DPB10402 DPA10301-DPB110501 DPA10301-DPB110601 DPA10301-DPB11101 DPA10301-DPB11301 DPA10301-DPB11801 DPA10301-DPB12301 DPA10301-DPB13901 DPA10301-DPB14001 DPA10301-DPB14901 DPA10301-DPB15501 DPA10301-DPB16501 DPA10301-DPB17501 DPA10301-DPB18001 DPA10401-DPB10101 DPA10401-DPB10201 DPA10401-DPB10202 DPA10401-DPB10402 DPA10401-DPB10501 DPA10401-DPB110501 DPA10401-DPB14901
KEPPYLWEGWELVPDKWTVQ

SEQ ID NO: 7356 - protein, 20 aa, synthetic construct
  source 1..20: note = Seed: KEPPFLWMGYELHPDKWTVQ; note = HLAs: DPA10103-DPB10101 DPA10103-DPB10201 DPA10103-DPB10202 DPA10103-DPB10401 DPA10103-DPB10402 DPA10103-DPB10501 DPA10103-DPB110501 DPA10103-DPB112601 DPA10103-DPB11501 DPA10103-DPB11601 DPA10103-DPB11801 DPA10103-DPB11901 DPA10103-DPB12301 DPA10103-DPB13101 DPA10103-DPB13401 DPA10103-DPB13901 DPA10103-DPB14001 DPA10103-DPB14101 DPA10103-DPB14801 DPA10103-DPB14901 DPA10103-DPB15001 DPA10103-DPB15101 DPA10103-DPB15501 DPA10103-DPB15901 DPA10103-DPB18001 DPA10104-DPB10101 DPA10104-DPB11501 DPA10105-DPB10101 DPA10105-DPB10401 DPA10105-DPB11801 DPA10105-DPB15001 DPA10106-DPB10101 DPA10201-DPB10101 DPA10201-DPB10201 DPA10201-DPB10202 DPA10201-DPB10401 DPA10201-DPB10501 DPA10201-DPB110601 DPA10201-DPB11501 DPA10201-DPB11601 DPA10201-DPB11901 DPA10201-DPB13401 DPA10201-DPB15501 DPA10202-DPB10101 DPA10202-DPB10201 DPA10202-DPB10202 DPA10202-DPB10401 DPA10202-DPB10501 DPA10202-DPB110601 DPA10202-DPB11101 DPA10202-DPB11301 DPA10202-DPB11801 DPA10202-DPB11901 DPA10202-DPB13101 DPA10202-DPB13801; note = HLAs: DPA10202-DPB15501 DPA10202-DPB16501 DPA10301-DPB10101 DPA10301-DPB10201 DPA10301-DPB10202 DPA10301-DPB10401 DPA10301-DPB10402 DPA10301-DPB110501 DPA10301-DPB110601 DPA10301-DPB11101 DPA10301-DPB11301 DPA10301-DPB11801 DPA10301-DPB12301 DPA10301-DPB13901 DPA10301-DPB14001 DPA10301-DPB14901 DPA10301-DPB15501 DPA10301-DPB16501 DPA10301-DPB17501 DPA10301-DPB18001 DPA10401-DPB10101 DPA10401-DPB10201 DPA10401-DPB10202 DPA10401-DPB10402 DPA10401-DPB10501 DPA10401-DPB110501 DPA10401-DPB14901
KEPPLLWTGFELDPDKWTVQ

SEQ ID NO: 7357 - protein, 20 aa, synthetic construct
  source 1..20: note = Seed: KEPPFLWMGYELHPDKWTVQ; note = HLAs: DRB1_0101 DPA10103-DPB10101 DPA10103-DPB10201 DPA10103-DPB10202 DPA10103-DPB10401 DPA10103-DPB10402 DPA10103-DPB10501 DPA10103-DPB110501 DPA10103-DPB112601 DPA10103-DPB11501 DPA10103-DPB11601 DPA10103-DPB11801 DPA10103-DPB11901 DPA10103-DPB12301 DPA10103-DPB13101 DPA10103-DPB13401 DPA10103-DPB13901 DPA10103-DPB14001 DPA10103-DPB14101 DPA10103-DPB14801 DPA10103-DPB14901 DPA10103-DPB15001 DPA10103-DPB15101 DPA10103-DPB15501 DPA10103-DPB15901 DPA10103-DPB18001 DPA10104-DPB10101 DPA10104-DPB11501 DPA10105-DPB10101 DPA10105-DPB10401 DPA10105-DPB11801 DPA10105-DPB15001 DPA10106-DPB10101 DPA10201-DPB10101 DPA10201-DPB10201 DPA10201-DPB10202 DPA10201-DPB10401 DPA10201-DPB10501 DPA10201-DPB110601 DPA10201-DPB11501 DPA10201-DPB11601 DPA10201-DPB11901 DPA10201-DPB13401 DPA10201-DPB15501 DPA10202-DPB10101 DPA10202-DPB10201 DPA10202-DPB10202 DPA10202-DPB10401 DPA10202-DPB10501 DPA10202-DPB110601 DPA10202-DPB11301 DPA10202-DPB11901 DPA10202-DPB13101 DPA10202-DPB13801 DPA10202-DPB15501; note = HLAs: DPA10202-DPB16501 DPA10301-DPB10101 DPA10301-DPB10201 DPA10301-DPB10202 DPA10301-DPB10401 DPA10301-DPB10402 DPA10301-DPB110501 DPA10301-DPB110601 DPA10301-DPB11101 DPA10301-DPB11301 DPA10301-DPB11801 DPA10301-DPB12301 DPA10301-DPB13901 DPA10301-DPB14001 DPA10301-DPB14901 DPA10301-DPB15501 DPA10301-DPB16501 DPA10301-DPB17501 DPA10301-DPB18001 DPA10401-DPB10101 DPA10401-DPB10201 DPA10401-DPB10202 DPA10401-DPB10402 DPA10401-DPB10501 DPA10401-DPB110501 DPA10401-DPB14901
KEPPWLWEGYELIPDKWTVQ

SEQ ID NO: 7358 - protein, 20 aa, synthetic construct
  source 1..20: note = Seed: KEPPFLWMGYELHPDKWTVQ; note = HLAs: DRB1_0101 DRB1_1001 DPA10103-DPB10101 DPA10103-DPB10201 DPA10103-DPB10202 DPA10103-DPB10401 DPA10103-DPB10402 DPA10103-DPB10501 DPA10103-DPB110501 DPA10103-DPB112601 DPA10103-DPB11501 DPA10103-DPB11601 DPA10103-DPB11801 DPA10103-DPB11901 DPA10103-DPB12301 DPA10103-DPB13101 DPA10103-DPB13401 DPA10103-DPB13901 DPA10103-DPB14001 DPA10103-DPB14101 DPA10103-DPB14801 DPA10103-DPB14901 DPA10103-DPB15001 DPA10103-DPB15101 DPA10103-DPB15501 DPA10103-DPB15901 DPA10103-DPB18001 DPA10104-DPB10101 DPA10104-DPB11501 DPA10105-DPB10101 DPA10105-DPB10401 DPA10105-DPB11801 DPA10105-DPB15001 DPA10106-DPB10101 DPA10201-DPB10101 DPA10201-DPB10201 DPA10201-DPB10202 DPA10201-DPB10401 DPA10201-DPB10501 DPA10201-DPB110601 DPA10201-DPB11501 DPA10201-DPB11601 DPA10201-DPB11901 DPA10201-DPB13401 DPA10201-DPB15501 DPA10202-DPB10101 DPA10202-DPB10201 DPA10202-DPB10202 DPA10202-DPB10401 DPA10202-DPB10501 DPA10202-DPB110601 DPA10202-DPB11101 DPA10202-DPB11301 DPA10202-DPB11801 DPA10202-DPB11901; note = HLAs: DPA10202-DPB13101 DPA10202-DPB13801 DPA10202-DPB15501 DPA10202-DPB16501 DPA10301-DPB10101 DPA10301-DPB10201 DPA10301-DPB10202 DPA10301-DPB10401 DPA10301-DPB10402 DPA10301-DPB110501 DPA10301-DPB110601 DPA10301-DPB11101 DPA10301-DPB11301 DPA10301-DPB11801 DPA10301-DPB12301 DPA10301-DPB13901 DPA10301-DPB14001 DPA10301-DPB14901 DPA10301-DPB15501 DPA10301-DPB16501 DPA10301-DPB17501 DPA10301-DPB18001 DPA10401-DPB10101 DPA10401-DPB10201 DPA10401-DPB10202 DPA10401-DPB10402 DPA10401-DPB10501 DPA10401-DPB110501 DPA10401-DPB14901
KEPPYLWAGLELIPDKWTVQ

SEQ ID NO: 7359 - protein, 20 aa, synthetic construct
  source 1..20: note = Seed: KEPPFLWMGYELHPDKWTVQ; note = HLAs: DPA10103-DPB10101 DPA10103-DPB10201 DPA10103-DPB10202 DPA10103-DPB10401 DPA10103-DPB10402 DPA10103-DPB10501 DPA10103-DPB110501 DPA10103-DPB112601 DPA10103-DPB11501 DPA10103-DPB11601 DPA10103-DPB11801 DPA10103-DPB11901 DPA10103-DPB12301 DPA10103-DPB13101 DPA10103-DPB13401 DPA10103-DPB13901 DPA10103-DPB14001 DPA10103-DPB14101 DPA10103-DPB14801 DPA10103-DPB14901 DPA10103-DPB15001 DPA10103-DPB15101 DPA10103-DPB15501 DPA10103-DPB15901 DPA10103-DPB18001 DPA10104-DPB10101 DPA10104-DPB11501 DPA10105-DPB10101 DPA10105-DPB10401 DPA10105-DPB11801 DPA10105-DPB15001 DPA10106-DPB10101 DPA10201-DPB10101 DPA10201-DPB10201 DPA10201-DPB10202 DPA10201-DPB10401 DPA10201-DPB10501 DPA10201-DPB110601 DPA10201-DPB11501 DPA10201-DPB11601 DPA10201-DPB11901 DPA10201-DPB13401 DPA10201-DPB15501 DPA10202-DPB10101 DPA10202-DPB10201 DPA10202-DPB10202 DPA10202-DPB10401 DPA10202-DPB10501 DPA10202-DPB110601 DPA10202-DPB11301 DPA10202-DPB11801 DPA10202-DPB11901 DPA10202-DPB13101 DPA10202-DPB13801 DPA10202-DPB15501; note = HLAs: DPA10202-DPB16501 DPA10301-DPB10101 DPA10301-DPB10201 DPA10301-DPB10202 DPA10301-DPB10401 DPA10301-DPB10402 DPA10301-DPB110501 DPA10301-DPB110601 DPA10301-DPB11101 DPA10301-DPB11301 DPA10301-DPB11801 DPA10301-DPB12301 DPA10301-DPB13901 DPA10301-DPB14001 DPA10301-DPB14901 DPA10301-DPB15501 DPA10301-DPB16501 DPA10301-DPB17501 DPA10301-DPB18001 DPA10401-DPB10101 DPA10401-DPB10201 DPA10401-DPB10202 DPA10401-DPB10402 DPA10401-DPB10501 DPA10401-DPB110501 DPA10401-DPB14901
KEPPFLWDGWELIPDKWTVQ

SEQ ID NO: 7360 - protein, 20 aa, synthetic construct
  source 1..20: note = Seed: KEPPFLWMGYELHPDKWTVQ; note = HLAs: DRB1_0101 DRB1_0405 DRB1_1001 DPA10103-DPB10101 DPA10103-DPB10201 DPA10103-DPB10202 DPA10103-DPB10401 DPA10103-DPB10402 DPA10103-DPB10501 DPA10103-DPB110501 DPA10103-DPB112601 DPA10103-DPB11501 DPA10103-DPB11601 DPA10103-DPB11801 DPA10103-DPB11901 DPA10103-DPB12301 DPA10103-DPB13101 DPA10103-DPB13401 DPA10103-DPB13901 DPA10103-DPB14001 DPA10103-DPB14101 DPA10103-DPB14801 DPA10103-DPB14901 DPA10103-DPB15001 DPA10103-DPB15101 DPA10103-DPB15501 DPA10103-DPB15901 DPA10103-DPB18001 DPA10104-DPB10101 DPA10104-DPB11501 DPA10105-DPB10101 DPA10105-DPB10401 DPA10105-DPB11801 DPA10105-DPB15001 DPA10106-DPB10101 DPA10201-DPB10101 DPA10201-DPB10201 DPA10201-DPB10202 DPA10201-DPB10401 DPA10201-DPB10501 DPA10201-DPB110601 DPA10201-DPB11501 DPA10201-DPB11601 DPA10201-DPB11901 DPA10201-DPB15501 DPA10202-DPB10101 DPA10202-DPB10201 DPA10202-DPB10202 DPA10202-DPB10401 DPA10202-DPB10501 DPA10202-DPB110601 DPA10202-DPB11101 DPA10202-DPB11301 DPA10202-DPB11801 DPA10202-DPB11901 DPA10202-DPB13101; note = HLAs: DPA10202-DPB13801 DPA10202-DPB15501 DPA10202-DPB16501 DPA10301-DPB10101 DPA10301-DPB10201 DPA10301-DPB10202 DPA10301-DPB10401 DPA10301-DPB10402 DPA10301-DPB110501 DPA10301-DPB110601 DPA10301-DPB11101 DPA10301-DPB11301 DPA10301-DPB11801 DPA10301-DPB12301 DPA10301-DPB13901 DPA10301-DPB14001 DPA10301-DPB14901 DPA10301-DPB15501 DPA10301-DPB16501 DPA10301-DPB17501 DPA10301-DPB18001 DPA10401-DPB10101 DPA10401-DPB10201 DPA10401-DPB10202 DPA10401-DPB10402 DPA10401-DPB10501 DPA10401-DPB110501 DPA10401-DPB14901
KEPPFLWMGAELIPDKWTVQ

SEQ ID NO: 7361 - protein, 14 aa, synthetic construct
  source 1..14: note = Seed: PPFLWMGYELHPDK; note = HLAs: DPA10103-DPB10101 DPA10103-DPB10201 DPA10103-DPB10202 DPA10103-DPB10401 DPA10103-DPB112601 DPA10103-DPB11501 DPA10103-DPB11601 DPA10103-DPB11901 DPA10103-DPB12301 DPA10103-DPB13101 DPA10103-DPB13401 DPA10103-DPB13901 DPA10103-DPB14001 DPA10103-DPB14101 DPA10103-DPB14801 DPA10103-DPB15001 DPA10103-DPB15901 DPA10104-DPB10101 DPA10104-DPB11501 DPA10105-DPB10101 DPA10105-DPB10401 DPA10105-DPB15001 DPA10106-DPB10101 DPA10201-DPB10101 DPA10201-DPB110601 DPA10201-DPB11501 DPA10201-DPB11601 DPA10201-DPB11901 DPA10202-DPB10101 DPA10202-DPB10201 DPA10202-DPB10202 DPA10202-DPB10401 DPA10202-DPB110601 DPA10202-DPB11901 DPA10202-DPB13101 DPA10202-DPB16501 DPA10301-DPB10101 DPA10301-DPB10201 DPA10301-DPB10202 DPA10301-DPB10401 DPA10301-DPB10402 DPA10301-DPB110501 DPA10301-DPB110601 DPA10301-DPB11801 DPA10301-DPB12301 DPA10301-DPB13901 DPA10301-DPB14001 DPA10301-DPB14901 DPA10301-DPB15501 DPA10301-DPB16501 DPA10301-DPB17501 DPA10301-DPB18001 DPA10401-DPB10101 DPA10401-DPB10201; note = HLAs: DPA10401-DPB10202 DPA10401-DPB10402 DPA10401-DPB110501 DPA10401-DPB14901
PPFLWGGYELIPDK

SEQ ID NO: 7362 - protein, 14 aa, synthetic construct
  source 1..14: note = Seed: PPFLWMGYELHPDK; note = HLAs: DPA10103-DPB10101 DPA10103-DPB10201 DPA10103-DPB10202 DPA10103-DPB10401 DPA10103-DPB112601 DPA10103-DPB11501 DPA10103-DPB11601 DPA10103-DPB11901 DPA10103-DPB12301 DPA10103-DPB13101 DPA10103-DPB13401 DPA10103-DPB13901 DPA10103-DPB14001 DPA10103-DPB14101 DPA10103-DPB14801 DPA10103-DPB15001 DPA10103-DPB15901 DPA10104-DPB10101 DPA10104-DPB11501 DPA10105-DPB10101 DPA10105-DPB10401 DPA10105-DPB15001 DPA10106-DPB10101 DPA10201-DPB10101 DPA10201-DPB110601 DPA10201-DPB11501 DPA10201-DPB11601 DPA10201-DPB11901 DPA10202-DPB10101 DPA10202-DPB10201 DPA10202-DPB10202 DPA10202-DPB10401 DPA10202-DPB110601 DPA10202-DPB11901 DPA10202-DPB13101 DPA10202-DPB16501 DPA10301-DPB10101 DPA10301-DPB10201 DPA10301-DPB10202 DPA10301-DPB10401 DPA10301-DPB10402 DPA10301-DPB110501 DPA10301-DPB110601 DPA10301-DPB11801 DPA10301-DPB12301 DPA10301-DPB13901 DPA10301-DPB14001 DPA10301-DPB14901 DPA10301-DPB15501 DPA10301-DPB16501 DPA10301-DPB17501 DPA10301-DPB18001 DPA10401-DPB10101 DPA10401-DPB10201; note = HLAs: DPA10401-DPB10202 DPA10401-DPB10402 DPA10401-DPB10501 DPA10401-DPB110501 DPA10401-DPB14901
PPFLWNGWELFPDK

SEQ ID NO: 7363 - protein, 20 aa, synthetic construct
  source 1..20: note = Seed: KEPPFLWMGYELHPDKWTVQ; note = HLAs: DRB1_0101 DRB1_0405 DRB1_1001 DPA10103-DPB10101 DPA10103-DPB10201 DPA10103-DPB10202 DPA10103-DPB10401 DPA10103-DPB10402 DPA10103-DPB10501 DPA10103-DPB110501 DPA10103-DPB112601 DPA10103-DPB11501 DPA10103-DPB11601 DPA10103-DPB11801 DPA10103-DPB11901 DPA10103-DPB12301 DPA10103-DPB13101 DPA10103-DPB13401 DPA10103-DPB13901 DPA10103-DPB14001 DPA10103-DPB14101 DPA10103-DPB14801 DPA10103-DPB14901 DPA10103-DPB15101 DPA10103-DPB15501 DPA10103-DPB15901 DPA10103-DPB18001 DPA10104-DPB10101 DPA10104-DPB11501 DPA10105-DPB10101 DPA10105-DPB10401 DPA10105-DPB11801 DPA10106-DPB10101 DPA10201-DPB10101 DPA10201-DPB10201 DPA10201-DPB10202 DPA10201-DPB10401 DPA10201-DPB10501 DPA10201-DPB110601 DPA10201-DPB11501 DPA10201-DPB11601 DPA10201-DPB11901 DPA10201-DPB15501 DPA10202-DPB10101 DPA10202-DPB10201 DPA10202-DPB10202 DPA10202-DPB10401 DPA10202-DPB10501 DPA10202-DPB110601 DPA10202-DPB11101 DPA10202-DPB11301 DPA10202-DPB11801 DPA10202-DPB11901 DPA10202-DPB13101 DPA10202-DPB13801 DPA10202-DPB15501; note = HLAs: DPA10202-DPB16501 DPA10301-DPB10101 DPA10301-DPB10201 DPA10301-DPB10202 DPA10301-DPB10401 DPA10301-DPB10402 DPA10301-DPB110501 DPA10301-DPB110601 DPA10301-DPB11101 DPA10301-DPB11301 DPA10301-DPB11801 DPA10301-DPB12301 DPA10301-DPB13901 DPA10301-DPB14001 DPA10301-DPB14901 DPA10301-DPB15501 DPA10301-DPB16501 DPA10301-DPB17501 DPA10301-DPB18001 DPA10401-DPB10201 DPA10401-DPB10202 DPA10401-DPB10402 DPA10401-DPB10501 DPA10401-DPB110501 DPA10401-DPB14901
KEPPYLWIGAELLPDKWTVQ

SEQ ID NO: 7364 - protein, 14 aa, synthetic construct
  source 1..14: note = Seed: PPFLWMGYELHPDK; note = HLAs: DRB1_1001 DPA10103-DPB10201 DPA10103-DPB10202 DPA10103-DPB10401 DPA10103-DPB112601 DPA10103-DPB11501 DPA10103-DPB11601 DPA10103-DPB12301 DPA10103-DPB13401 DPA10103-DPB13901 DPA10103-DPB14001 DPA10103-DPB14101 DPA10103-DPB14801 DPA10103-DPB15901 DPA10104-DPB11501 DPA10105-DPB10401 DPA10106-DPB10101 DPA10201-DPB10101 DPA10201-DPB110601 DPA10201-DPB11501 DPA10201-DPB11601 DPA10201-DPB11901 DPA10202-DPB10101 DPA10202-DPB10201 DPA10202-DPB10202 DPA10202-DPB110601 DPA10202-DPB11901 DPA10202-DPB13101 DPA10202-DPB16501 DPA10301-DPB10201 DPA10301-DPB10202 DPA10301-DPB10401 DPA10301-DPB10402 DPA10301-DPB110501 DPA10301-DPB110601 DPA10301-DPB11801 DPA10301-DPB12301 DPA10301-DPB13901 DPA10301-DPB14001 DPA10301-DPB14901 DPA10301-DPB15501 DPA10301-DPB17501 DPA10301-DPB18001 DPA10401-DPB10201 DPA10401-DPB10202 DPA10401-DPB10402 DPA10401-DPB10501 DPA10401-DPB110501 DPA10401-DPB14901
PPYLWMGIELLPDK

SEQ ID NO: 7365 - protein, 14 aa, synthetic construct
  source 1..14: note = Seed: PPFLWMGYELHPDK; note = HLAs: DPA10103-DPB10101 DPA10103-DPB10201 DPA10103-DPB10202 DPA10103-DPB10401 DPA10103-DPB112601 DPA10103-DPB11501 DPA10103-DPB11601 DPA10103-DPB11901 DPA10103-DPB12301 DPA10103-DPB13101 DPA10103-DPB13401 DPA10103-DPB13901 DPA10103-DPB14001 DPA10103-DPB14101 DPA10103-DPB14801 DPA10103-DPB15001 DPA10103-DPB15901 DPA10104-DPB10101 DPA10104-DPB11501 DPA10105-DPB10101 DPA10105-DPB10401 DPA10105-DPB15001 DPA10106-DPB10101 DPA10201-DPB10101 DPA10201-DPB110601 DPA10201-DPB11501 DPA10201-DPB11601 DPA10201-DPB11901 DPA10202-DPB10101 DPA10202-DPB10201 DPA10202-DPB10202 DPA10202-DPB10401 DPA10202-DPB110601 DPA10202-DPB11901 DPA10202-DPB13101 DPA10202-DPB16501 DPA10301-DPB10101 DPA10301-DPB10201 DPA10301-DPB10202 DPA10301-DPB10401 DPA10301-DPB10402 DPA10301-DPB110501 DPA10301-DPB110601 DPA10301-DPB11801 DPA10301-DPB12301 DPA10301-DPB13901 DPA10301-DPB14001 DPA10301-DPB14901 DPA10301-DPB15501 DPA10301-DPB16501 DPA10301-DPB17501 DPA10301-DPB18001 DPA10401-DPB10101 DPA10401-DPB10201; note = HLAs: DPA10401-DPB10202 DPA10401-DPB10402 DPA10401-DPB10501 DPA10401-DPB110501 DPA10401-DPB14901
PPVLWSGFELSPDK

SEQ ID NO: 7366 - protein, 20 aa, synthetic construct
  source 1..20: note = Seed: KEPPFLWMGYELHPDKWTVQ; note = HLAs: DPA10103-DPB10101 DPA10103-DPB10201 DPA10103-DPB10202 DPA10103-DPB10401 DPA10103-DPB10402 DPA10103-DPB10501 DPA10103-DPB110501 DPA10103-DPB112601 DPA10103-DPB11501 DPA10103-DPB11601 DPA10103-DPB11801 DPA10103-DPB11901 DPA10103-DPB12301 DPA10103-DPB13101 DPA10103-DPB13401 DPA10103-DPB13901 DPA10103-DPB14001 DPA10103-DPB14101 DPA10103-DPB14801 DPA10103-DPB14901 DPA10103-DPB15001 DPA10103-DPB15101 DPA10103-DPB15501 DPA10103-DPB15901 DPA10103-DPB18001 DPA10104-DPB10101 DPA10104-DPB11501 DPA10105-DPB10101 DPA10105-DPB10401 DPA10105-DPB11801 DPA10105-DPB15001 DPA10106-DPB10101 DPA10201-DPB10101 DPA10201-DPB10201 DPA10201-DPB10202 DPA10201-DPB10401 DPA10201-DPB10501 DPA10201-DPB110601 DPA10201-DPB11501 DPA10201-DPB11601 DPA10201-DPB11901 DPA10201-DPB13401 DPA10201-DPB15501 DPA10202-DPB10101 DPA10202-DPB10201 DPA10202-DPB10202 DPA10202-DPB10401 DPA10202-DPB10501 DPA10202-DPB110601 DPA10202-DPB11101 DPA10202-DPB11301 DPA10202-DPB11801 DPA10202-DPB11901 DPA10202-DPB13101 DPA10202-DPB13801; note = HLAs: DPA10202-DPB15501 DPA10202-DPB16501 DPA10301-DPB10101 DPA10301-DPB10201 DPA10301-DPB10202 DPA10301-DPB10401 DPA10301-DPB10402 DPA10301-DPB110501 DPA10301-DPB110601 DPA10301-DPB11101 DPA10301-DPB11301 DPA10301-DPB11801 DPA10301-DPB12301 DPA10301-DPB13901 DPA10301-DPB14001 DPA10301-DPB14901 DPA10301-DPB15501 DPA10301-DPB16501 DPA10301-DPB17501 DPA10301-DPB18001 DPA10401-DPB10101 DPA10401-DPB10201 DPA10401-DPB10202 DPA10401-DPB10402 DPA10401-DPB10501 DPA10401-DPB110501 DPA10401-DPB14901
KEPPLLWVGYELMPDKWTVQ

SEQ ID NO: 7367 - protein, 14 aa, synthetic construct
  source 1..14: note = Seed: PPFLWMGYELHPDK; note = HLAs: DRB1_1001 DPA10201-DPB11501 DPA10202-DPB10202 DPA10202-DPB110601 DPA10202-DPB11901 DPA10301-DPB10201 DPA10301-DPB11801 DPA10301-DPB14001
PPLLWVGVELLPDK

SEQ ID NO: 7368 - protein, 14 aa, synthetic construct
  source 1..14: note = Seed: PPFLWMGYELHPDK; note = HLAs: DPA10103-DPB10101 DPA10103-DPB10201 DPA10103-DPB10202 DPA10103-DPB10401 DPA10103-DPB112601 DPA10103-DPB11501 DPA10103-DPB11601 DPA10103-DPB11901 DPA10103-DPB12301 DPA10103-DPB13101 DPA10103-DPB13401 DPA10103-DPB13901 DPA10103-DPB14001 DPA10103-DPB14101 DPA10103-DPB14801 DPA10103-DPB15001 DPA10103-DPB15901 DPA10104-DPB10101 DPA10104-DPB11501 DPA10105-DPB10101 DPA10105-DPB10401 DPA10105-DPB15001 DPA10106-DPB10101 DPA10201-DPB10101 DPA10201-DPB110601 DPA10201-DPB11501 DPA10201-DPB11601 DPA10201-DPB11901 DPA10202-DPB10101 DPA10202-DPB10201 DPA10202-DPB10202 DPA10202-DPB10401 DPA10202-DPB110601 DPA10202-DPB11901 DPA10202-DPB13101 DPA10202-DPB16501 DPA10301-DPB10101 DPA10301-DPB10201 DPA10301-DPB10202 DPA10301-DPB10401 DPA10301-DPB10402 DPA10301-DPB110501 DPA10301-DPB110601 DPA10301-DPB11801 DPA10301-DPB12301 DPA10301-DPB13901 DPA10301-DPB14001 DPA10301-DPB14901 DPA10301-DPB15501 DPA10301-DPB16501 DPA10301-DPB17501 DPA10301-DPB18001 DPA10401-DPB10101 DPA10401-DPB10201; note = HLAs: DPA10401-DPB10202 DPA10401-DPB10402 DPA10401-DPB10501 DPA10401-DPB110501 DPA10401-DPB14901
PPMLWAGFELTPDK

SEQ ID NO: 7369 - protein, 14 aa, synthetic construct
  source 1..14: note = Seed: PPFLWMGYELHPDK; note = HLAs: DRB1_1001 DPA10103-DPB10101 DPA10103-DPB10201 DPA10103-DPB10202 DPA10103-DPB10401 DPA10103-DPB112601 DPA10103-DPB11501 DPA10103-DPB11601 DPA10103-DPB11901 DPA10103-DPB12301 DPA10103-DPB13101 DPA10103-DPB13401 DPA10103-DPB13901 DPA10103-DPB14001 DPA10103-DPB14101 DPA10103-DPB14801 DPA10103-DPB15001 DPA10103-DPB15901 DPA10104-DPB10101 DPA10104-DPB11501 DPA10105-DPB10101 DPA10105-DPB10401 DPA10105-DPB15001 DPA10106-DPB10101 DPA10201-DPB10101 DPA10201-DPB110601 DPA10201-DPB11501 DPA10201-DPB11601 DPA10201-DPB11901 DPA10202-DPB10101 DPA10202-DPB10201 DPA10202-DPB10202 DPA10202-DPB10401 DPA10202-DPB110601 DPA10202-DPB11901 DPA10202-DPB13101 DPA10202-DPB16501 DPA10301-DPB10101 DPA10301-DPB10201 DPA10301-DPB10202 DPA10301-DPB10401 DPA10301-DPB10402 DPA10301-DPB110501 DPA10301-DPB110601 DPA10301-DPB11801 DPA10301-DPB12301 DPA10301-DPB13901 DPA10301-DPB14001 DPA10301-DPB14901 DPA10301-DPB15501 DPA10301-DPB16501 DPA10301-DPB17501 DPA10301-DPB18001 DPA10401-DPB10101 DPA10401-DPB10201; note = HLAs: DPA10401-DPB10202 DPA10401-DPB10402 DPA10401-DPB10501 DPA10401-DPB110501 DPA10401-DPB14901
PPWLWAGFELSPDK

SEQ ID NO: 7370 - protein, 14 aa, synthetic construct
  source 1..14: note = Seed: PPFLWMGYELHPDK; note = HLAs: DPA10103-DPB10101 DPA10103-DPB10201 DPA10103-DPB10202 DPA10103-DPB10401 DPA10103-DPB112601 DPA10103-DPB11501 DPA10103-DPB11601 DPA10103-DPB11901 DPA10103-DPB12301 DPA10103-DPB13101 DPA10103-DPB13401 DPA10103-DPB13901 DPA10103-DPB14001 DPA10103-DPB14101 DPA10103-DPB14801 DPA10103-DPB15001 DPA10103-DPB15901 DPA10104-DPB10101 DPA10104-DPB11501 DPA10105-DPB10101 DPA10105-DPB10401 DPA10105-DPB15001 DPA10106-DPB10101 DPA10201-DPB10101 DPA10201-DPB110601 DPA10201-DPB11501 DPA10201-DPB11601 DPA10201-DPB11901 DPA10202-DPB10101 DPA10202-DPB10201 DPA10202-DPB10202 DPA10202-DPB10401 DPA10202-DPB110601 DPA10202-DPB11901 DPA10202-DPB13101 DPA10202-DPB16501 DPA10301-DPB10201 DPA10301-DPB10202 DPA10301-DPB10401 DPA10301-DPB10402 DPA10301-DPB110501 DPA10301-DPB110601 DPA10301-DPB11801 DPA10301-DPB12301 DPA10301-DPB13901 DPA10301-DPB14001 DPA10301-DPB14901 DPA10301-DPB15501 DPA10301-DPB16501 DPA10301-DPB17501 DPA10301-DPB18001 DPA10401-DPB10101 DPA10401-DPB10201 DPA10401-DPB10202; note = HLAs: DPA10401-DPB10402 DPA10401-DPB10501 DPA10401-DPB110501 DPA10401-DPB14901
PPFLWWGWELIPDK

SEQ ID NO: 7371 - protein, 20 aa, synthetic construct
  source 1..20: note = Seed: KEPPFLWMGYELHPDKWTVQ; note = HLAs: DRB1_0101 DRB1_0405 DRB1_1001 DPA10103-DPB10101 DPA10103-DPB10201 DPA10103-DPB10202 DPA10103-DPB10401 DPA10103-DPB10402 DPA10103-DPB10501 DPA10103-DPB110501 DPA10103-DPB112601 DPA10103-DPB11501 DPA10103-DPB11601 DPA10103-DPB11801 DPA10103-DPB11901 DPA10103-DPB12301 DPA10103-DPB13101 DPA10103-DPB13401 DPA10103-DPB13901 DPA10103-DPB14001 DPA10103-DPB14101 DPA10103-DPB14801 DPA10103-DPB14901 DPA10103-DPB15001 DPA10103-DPB15101 DPA10103-DPB15501 DPA10103-DPB15901 DPA10103-DPB18001 DPA10104-DPB10101 DPA10104-DPB11501 DPA10105-DPB10101 DPA10105-DPB10401 DPA10105-DPB11801 DPA10105-DPB15001 DPA10106-DPB10101 DPA10201-DPB10101 DPA10201-DPB10201 DPA10201-DPB10202 DPA10201-DPB10401 DPA10201-DPB10501 DPA10201-DPB110601 DPA10201-DPB11501 DPA10201-DPB11601 DPA10201-DPB11901 DPA10201-DPB13401 DPA10201-DPB15501 DPA10202-DPB10101 DPA10202-DPB10201 DPA10202-DPB10202 DPA10202-DPB10401 DPA10202-DPB10501 DPA10202-DPB110601 DPA10202-DPB11101 DPA10202-DPB11301 DPA10202-DPB11801 DPA10202-DPB11901; note = HLAs: DPA10202-DPB13101 DPA10202-DPB13801 DPA10202-DPB15501 DPA10202-DPB16501 DPA10301-DPB10101 DPA10301-DPB10201 DPA10301-DPB10202 DPA10301-DPB10401 DPA10301-DPB10402 DPA10301-DPB110501 DPA10301-DPB110601 DPA10301-DPB11101 DPA10301-DPB11301 DPA10301-DPB11801 DPA10301-DPB12301 DPA10301-DPB13901 DPA10301-DPB14001 DPA10301-DPB14901 DPA10301-DPB15501 DPA10301-DPB16501 DPA10301-DPB17501 DPA10301-DPB18001 DPA10401-DPB10101 DPA10401-DPB10201 DPA10401-DPB10202 DPA10401-DPB10402 DPA10401-DPB10501 DPA10401-DPB110501 DPA10401-DPB14901
KEPPFLWIGAELMPDKWTVQ

SEQ ID NO: 7372 - protein, 20 aa, synthetic construct
  source 1..20: note = Seed: KEPPFLWMGYELHPDKWTVQ; note = HLAs: DRB1_0101 DRB1_0405 DRB1_1001 DPA10103-DPB10101 DPA10103-DPB10201 DPA10103-DPB10202 DPA10103-DPB10401 DPA10103-DPB10402 DPA10103-DPB10501 DPA10103-DPB110501 DPA10103-DPB112601 DPA10103-DPB11501 DPA10103-DPB11601 DPA10103-DPB11801 DPA10103-DPB11901 DPA10103-DPB12301 DPA10103-DPB13101 DPA10103-DPB13401 DPA10103-DPB13901 DPA10103-DPB14001 DPA10103-DPB14101 DPA10103-DPB14801 DPA10103-DPB14901 DPA10103-DPB15001 DPA10103-DPB15101 DPA10103-DPB15501 DPA10103-DPB15901 DPA10103-DPB18001 DPA10104-DPB10101 DPA10104-DPB11501 DPA10105-DPB10101 DPA10105-DPB10401 DPA10105-DPB11801 DPA10105-DPB15001 DPA10106-DPB10101 DPA10201-DPB10101 DPA10201-DPB10201 DPA10201-DPB10202 DPA10201-DPB10401 DPA10201-DPB10501 DPA10201-DPB110601 DPA10201-DPB11501 DPA10201-DPB11601 DPA10201-DPB11901 DPA10201-DPB13401 DPA10201-DPB15501 DPA10202-DPB10101 DPA10202-DPB10201 DPA10202-DPB10202 DPA10202-DPB10401 DPA10202-DPB10501 DPA10202-DPB110601 DPA10202-DPB11101 DPA10202-DPB11301 DPA10202-DPB11801 DPA10202-DPB11901; note = HLAs: DPA10202-DPB13101 DPA10202-DPB13801 DPA10202-DPB15501 DPA10202-DPB16501 DPA10301-DPB10101 DPA10301-DPB10201 DPA10301-DPB10202 DPA10301-DPB10401 DPA10301-DPB10402 DPA10301-DPB110501 DPA10301-DPB110601 DPA10301-DPB11101 DPA10301-DPB11301 DPA10301-DPB11801 DPA10301-DPB12301 DPA10301-DPB13901 DPA10301-DPB14001 DPA10301-DPB14901 DPA10301-DPB15501 DPA10301-DPB16501 DPA10301-DPB17501 DPA10301-DPB18001 DPA10401-DPB10101 DPA10401-DPB10201 DPA10401-DPB10202 DPA10401-DPB10402 DPA10401-DPB10501 DPA10401-DPB110501 DPA10401-DPB14901
KEPPFLWSGVELFPDKWTVQ

SEQ ID NO: 7373 - protein, 14 aa, synthetic construct
  source 1..14: note = Seed: PPFLWMGYELHPDK; note = HLAs: DPA10103-DPB10101 DPA10103-DPB10201 DPA10103-DPB10202 DPA10103-DPB10401 DPA10103-DPB112601 DPA10103-DPB11501 DPA10103-DPB11601 DPA10103-DPB11901 DPA10103-DPB12301 DPA10103-DPB13101 DPA10103-DPB13401 DPA10103-DPB13901 DPA10103-DPB14001 DPA10103-DPB14101 DPA10103-DPB14801 DPA10103-DPB15001 DPA10103-DPB15901 DPA10104-DPB10101 DPA10104-DPB11501 DPA10105-DPB10101 DPA10105-DPB10401 DPA10105-DPB15001 DPA10106-DPB10101 DPA10201-DPB10101 DPA10201-DPB110601 DPA10201-DPB11501 DPA10201-DPB11601 DPA10201-DPB11901 DPA10202-DPB10101 DPA10202-DPB10201 DPA10202-DPB10202 DPA10202-DPB10401 DPA10202-DPB110601 DPA10202-DPB11901 DPA10202-DPB13101 DPA10202-DPB16501 DPA10301-DPB10101 DPA10301-DPB10201 DPA10301-DPB10202 DPA10301-DPB10401 DPA10301-DPB10402 DPA10301-DPB110501 DPA10301-DPB110601 DPA10301-DPB11801 DPA10301-DPB12301 DPA10301-DPB13901 DPA10301-DPB14001 DPA10301-DPB14901 DPA10301-DPB16501 DPA10301-DPB17501 DPA10301-DPB18001 DPA10401-DPB10101 DPA10401-DPB10201 DPA10401-DPB10202
PPWLWHGYELLPDK

SEQ ID NO: 7374 - protein, 20 aa, synthetic construct
  source 1..20: note = Seed: KEPPFLWMGYELHPDKWTVQ; note = HLAs: DRB1_0101 DRB1_0405 DRB1_1001 DPA10103-DPB10201 DPA10103-DPB10202 DPA10103-DPB10401 DPA10103-DPB10402 DPA10103-DPB10501 DPA10103-DPB110501 DPA10103-DPB112601 DPA10103-DPB11501 DPA10103-DPB11601 DPA10103-DPB11801 DPA10103-DPB11901 DPA10103-DPB12301 DPA10103-DPB13101 DPA10103-DPB13401 DPA10103-DPB13901 DPA10103-DPB14001 DPA10103-DPB14101 DPA10103-DPB14801 DPA10103-DPB14901 DPA10103-DPB15001 DPA10103-DPB15101 DPA10103-DPB15501 DPA10103-DPB15901 DPA10103-DPB18001 DPA10104-DPB11501 DPA10105-DPB10401 DPA10105-DPB11801 DPA10105-DPB15001 DPA10106-DPB10101 DPA10201-DPB10101 DPA10201-DPB10201 DPA10201-DPB10202 DPA10201-DPB10401 DPA10201-DPB10501 DPA10201-DPB110601 DPA10201-DPB11501 DPA10201-DPB11601 DPA10201-DPB11901 DPA10201-DPB13401 DPA10201-DPB15501 DPA10202-DPB10101 DPA10202-DPB10201 DPA10202-DPB10202 DPA10202-DPB10401 DPA10202-DPB10501 DPA10202-DPB110601 DPA10202-DPB11101 DPA10202-DPB11301 DPA10202-DPB11801 DPA10202-DPB11901 DPA10202-DPB13101 DPA10202-DPB13801 DPA10202-DPB15501; note = HLAs: DPA10202-DPB16501 DPA10301-DPB10101 DPA10301-DPB10201 DPA10301-DPB10202 DPA10301-DPB10401 DPA10301-DPB10402 DPA10301-DPB110501 DPA10301-DPB110601 DPA10301-DPB11101 DPA10301-DPB11301 DPA10301-DPB11801 DPA10301-DPB12301 DPA10301-DPB13901 DPA10301-DPB14001 DPA10301-DPB14901 DPA10301-DPB15501 DPA10301-DPB16501 DPA10301-DPB17501 DPA10301-DPB18001 DPA10401-DPB10201 DPA10401-DPB10202 DPA10401-DPB10402 DPA10401-DPB10501 DPA10401-DPB110501 DPA10401-DPB14901
KEPPFLWQGAELLPDKWTVQ

SEQ ID NO: 7375 - protein, 14 aa, synthetic construct
  source 1..14: note = Seed: PPFLWMGYELHPDK; note = HLAs: DPA10103-DPB10101 DPA10103-DPB10201 DPA10103-DPB10202 DPA10103-DPB10401 DPA10103-DPB112601 DPA10103-DPB11501 DPA10103-DPB11601 DPA10103-DPB11901 DPA10103-DPB12301 DPA10103-DPB13101 DPA10103-DPB13401 DPA10103-DPB13901 DPA10103-DPB14001 DPA10103-DPB14101 DPA10103-DPB14801 DPA10103-DPB15001 DPA10103-DPB15901 DPA10104-DPB10101 DPA10104-DPB11501 DPA10105-DPB10101 DPA10105-DPB10401 DPA10105-DPB15001 DPA10106-DPB10101 DPA10201-DPB10101 DPA10201-DPB110601 DPA10201-DPB11501 DPA10201-DPB11601 DPA10201-DPB11901 DPA10202-DPB10101 DPA10202-DPB10201 DPA10202-DPB10202 DPA10202-DPB10401 DPA10202-DPB110601 DPA10202-DPB11901 DPA10202-DPB13101 DPA10202-DPB16501 DPA10301-DPB10101 DPA10301-DPB10201 DPA10301-DPB10202 DPA10301-DPB10401 DPA10301-DPB10402 DPA10301-DPB110501 DPA10301-DPB110601 DPA10301-DPB11801 DPA10301-DPB12301 DPA10301-DPB13901 DPA10301-DPB14001 DPA10301-DPB14901 DPA10301-DPB15501 DPA10301-DPB16501 DPA10301-DPB17501 DPA10301-DPB18001 DPA10401-DPB10101 DPA10401-DPB10201; note = HLAs: DPA10401-DPB10202 DPA10401-DPB10402 DPA10401-DPB10501 DPA10401-DPB110501 DPA10401-DPB14901
PPFLWSGYELNPDK

SEQ ID NO: 7376 - protein, 20 aa, synthetic construct
  source 1..20: note = Seed: KEPPFLWMGYELHPDKWTVQ; note = HLAs: DPA10103-DPB10201 DPA10103-DPB10202 DPA10103-DPB10401 DPA10103-DPB10501 DPA10103-DPB112601 DPA10103-DPB11501 DPA10103-DPB11601 DPA10103-DPB11801 DPA10103-DPB11901 DPA10103-DPB12301 DPA10103-DPB13401 DPA10103-DPB13901 DPA10103-DPB14001 DPA10103-DPB14101 DPA10103-DPB14801 DPA10103-DPB15901 DPA10104-DPB11501 DPA10105-DPB10401 DPA10105-DPB11801 DPA10106-DPB10101 DPA10201-DPB10101 DPA10201-DPB10201 DPA10201-DPB10202 DPA10201-DPB10401 DPA10201-DPB10501 DPA10201-DPB110601 DPA10201-DPB11501 DPA10201-DPB11601 DPA10201-DPB11901 DPA10201-DPB13401 DPA10201-DPB15501 DPA10202-DPB10201 DPA10202-DPB10202 DPA10202-DPB10401 DPA10202-DPB10501 DPA10202-DPB110601 DPA10202-DPB11801 DPA10202-DPB11901 DPA10202-DPB13101 DPA10202-DPB13801 DPA10301-DPB10201 DPA10301-DPB10202 DPA10301-DPB10402 DPA10301-DPB110501 DPA10301-DPB110601 DPA10301-DPB11301 DPA10301-DPB11801 DPA10301-DPB14001 DPA10301-DPB14901 DPA10301-DPB15501 DPA10301-DPB17501 DPA10301-DPB18001 DPA10401-DPB10201 DPA10401-DPB10202; note = HLAs: DPA10401-DPB10402 DPA10401-DPB10501 DPA10401-DPB110501 DPA10401-DPB14901
KEPPLLWHGIELLPDKWTVQ

SEQ ID NO: 7377 - protein, 20 aa, synthetic construct
  source 1..20: note = Seed: KEPPFLWMGYELHPDKWTVQ; note = HLAs: DPA10103-DPB10101 DPA10103-DPB10201 DPA10103-DPB10202 DPA10103-DPB10401 DPA10103-DPB10402 DPA10103-DPB10501 DPA10103-DPB110501 DPA10103-DPB112601 DPA10103-DPB11501 DPA10103-DPB11601 DPA10103-DPB11801 DPA10103-DPB11901 DPA10103-DPB12301 DPA10103-DPB13101 DPA10103-DPB13401 DPA10103-DPB13901 DPA10103-DPB14001 DPA10103-DPB14101 DPA10103-DPB14801 DPA10103-DPB14901 DPA10103-DPB15001 DPA10103-DPB15101 DPA10103-DPB15501 DPA10103-DPB15901 DPA10103-DPB18001 DPA10104-DPB10101 DPA10104-DPB11501 DPA10105-DPB10101 DPA10105-DPB10401 DPA10105-DPB11801 DPA10105-DPB15001 DPA10106-DPB10101 DPA10201-DPB10101 DPA10201-DPB10201 DPA10201-DPB10202 DPA10201-DPB10401 DPA10201-DPB10501 DPA10201-DPB110601 DPA10201-DPB11501 DPA10201-DPB11601 DPA10201-DPB11901 DPA10201-DPB13401 DPA10201-DPB15501 DPA10202-DPB10101 DPA10202-DPB10201 DPA10202-DPB10202 DPA10202-DPB10401 DPA10202-DPB10501 DPA10202-DPB110601 DPA10202-DPB11101 DPA10202-DPB11301 DPA10202-DPB11801 DPA10202-DPB11901 DPA10202-DPB13101 DPA10202-DPB13801; note = HLAs: DPA10202-DPB15501 DPA10202-DPB16501 DPA10301-DPB10101 DPA10301-DPB10201 DPA10301-DPB10202 DPA10301-DPB10401 DPA10301-DPB10402 DPA10301-DPB110501 DPA10301-DPB110601 DPA10301-DPB11101 DPA10301-DPB11301 DPA10301-DPB11801 DPA10301-DPB12301 DPA10301-DPB13901 DPA10301-DPB14001 DPA10301-DPB14901 DPA10301-DPB15501 DPA10301-DPB16501 DPA10301-DPB17501 DPA10301-DPB18001 DPA10401-DPB10101 DPA10401-DPB10201 DPA10401-DPB10202 DPA10401-DPB10402 DPA10401-DPB10501 DPA10401-DPB110501 DPA10401-DPB14901
KEPPWLWTGFELHPDKWTVQ

SEQ ID NO: 7378 - protein, 20 aa, synthetic construct
  source 1..20: note = Seed: KEPPFLWMGYELHPDKWTVQ; note = HLAs: DRB1_0101 DRB1_1001 DPA10103-DPB10101 DPA10103-DPB10201 DPA10103-DPB10202 DPA10103-DPB10401 DPA10103-DPB10402 DPA10103-DPB10501 DPA10103-DPB110501 DPA10103-DPB112601 DPA10103-DPB11501 DPA10103-DPB11601 DPA10103-DPB11801 DPA10103-DPB11901 DPA10103-DPB12301 DPA10103-DPB13101 DPA10103-DPB13401 DPA10103-DPB13901 DPA10103-DPB14001 DPA10103-DPB14101 DPA10103-DPB14801 DPA10103-DPB14901 DPA10103-DPB15001 DPA10103-DPB15101 DPA10103-DPB15501 DPA10103-DPB15901 DPA10103-DPB18001 DPA10104-DPB10101 DPA10104-DPB11501 DPA10105-DPB10101 DPA10105-DPB10401 DPA10105-DPB11801 DPA10105-DPB15001 DPA10106-DPB10101 DPA10201-DPB10101 DPA10201-DPB10201 DPA10201-DPB10202 DPA10201-DPB10501 DPA10201-DPB110601 DPA10201-DPB11501 DPA10201-DPB11601 DPA10201-DPB11901 DPA10201-DPB13401 DPA10201-DPB15501 DPA10202-DPB10101 DPA10202-DPB10201 DPA10202-DPB10202 DPA10202-DPB10401 DPA10202-DPB10501 DPA10202-DPB110601 DPA10202-DPB11101 DPA10202-DPB11301 DPA10202-DPB11801 DPA10202-DPB11901 DPA10202-DPB13101; note = HLAs: DPA10202-DPB13801 DPA10202-DPB15501 DPA10202-DPB16501 DPA10301-DPB10101 DPA10301-DPB10201 DPA10301-DPB10202 DPA10301-DPB10401 DPA10301-DPB10402 DPA10301-DPB110501 DPA10301-DPB110601 DPA10301-DPB11101 DPA10301-DPB11301 DPA10301-DPB11801 DPA10301-DPB12301 DPA10301-DPB13901 DPA10301-DPB14001 DPA10301-DPB14901 DPA10301-DPB15501 DPA10301-DPB16501 DPA10301-DPB17501 DPA10301-DPB18001 DPA10401-DPB10101 DPA10401-DPB10201 DPA10401-DPB10202 DPA10401-DPB10402 DPA10401-DPB10501 DPA10401-DPB110501 DPA10401-DPB14901
KEPPFLWAGLELNPDKWTVQ

SEQ ID NO: 7379 - protein, 20 aa, synthetic construct
  source 1..20: note = Seed: KEPPFLWMGYELHPDKWTVQ; note = HLAs: DPA10103-DPB10101 DPA10103-DPB10201 DPA10103-DPB10202 DPA10103-DPB10401 DPA10103-DPB10402 DPA10103-DPB10501 DPA10103-DPB110501 DPA10103-DPB112601 DPA10103-DPB11501 DPA10103-DPB11601 DPA10103-DPB11801 DPA10103-DPB11901 DPA10103-DPB12301 DPA10103-DPB13101 DPA10103-DPB13401 DPA10103-DPB13901 DPA10103-DPB14001 DPA10103-DPB14101 DPA10103-DPB14801 DPA10103-DPB14901 DPA10103-DPB15001 DPA10103-DPB15101 DPA10103-DPB15501 DPA10103-DPB15901 DPA10103-DPB18001 DPA10104-DPB10101 DPA10104-DPB11501 DPA10105-DPB10101 DPA10105-DPB10401 DPA10105-DPB11801 DPA10105-DPB15001 DPA10106-DPB10101 DPA10201-DPB10101 DPA10201-DPB10201 DPA10201-DPB10202 DPA10201-DPB10401 DPA10201-DPB10501 DPA10201-DPB110601 DPA10201-DPB11501 DPA10201-DPB11601 DPA10201-DPB11901 DPA10201-DPB13401 DPA10201-DPB15501 DPA10202-DPB10101 DPA10202-DPB10201 DPA10202-DPB10202 DPA10202-DPB10401 DPA10202-DPB10501 DPA10202-DPB110601 DPA10202-DPB11101 DPA10202-DPB11301 DPA10202-DPB11801 DPA10202-DPB11901 DPA10202-DPB13101 DPA10202-DPB13801; note = HLAs: DPA10202-DPB15501 DPA10202-DPB16501 DPA10301-DPB10101 DPA10301-DPB10201 DPA10301-DPB10202 DPA10301-DPB10401 DPA10301-DPB10402 DPA10301-DPB110501 DPA10301-DPB110601 DPA10301-DPB11101 DPA10301-DPB11301 DPA10301-DPB11801 DPA10301-DPB12301 DPA10301-DPB13901 DPA10301-DPB14001 DPA10301-DPB14901 DPA10301-DPB15501 DPA10301-DPB16501 DPA10301-DPB17501 DPA10301-DPB18001 DPA10401-DPB10101 DPA10401-DPB10201 DPA10401-DPB10202 DPA10401-DPB10402 DPA10401-DPB10501 DPA10401-DPB110501 DPA10401-DPB14901
KEPPMLWIGYELIPDKWTVQ

SEQ ID NO: 7380 - protein, 20 aa, synthetic construct
  source 1..20: note = Seed: KEPPFLWMGYELHPDKWTVQ; note = HLAs: DPA10103-DPB10101 DPA10103-DPB10201 DPA10103-DPB10202 DPA10103-DPB10401 DPA10103-DPB10402 DPA10103-DPB10501 DPA10103-DPB110501 DPA10103-DPB112601 DPA10103-DPB11501 DPA10103-DPB11601 DPA10103-DPB11801 DPA10103-DPB11901 DPA10103-DPB12301 DPA10103-DPB13101 DPA10103-DPB13401 DPA10103-DPB13901 DPA10103-DPB14001 DPA10103-DPB14101 DPA10103-DPB14801 DPA10103-DPB14901 DPA10103-DPB15001 DPA10103-DPB15101 DPA10103-DPB15501 DPA10103-DPB15901 DPA10103-DPB18001 DPA10104-DPB10101 DPA10104-DPB11501 DPA10105-DPB10101 DPA10105-DPB10401 DPA10105-DPB11801 DPA10105-DPB15001 DPA10106-DPB10101 DPA10201-DPB10101 DPA10201-DPB10201 DPA10201-DPB10202 DPA10201-DPB10401 DPA10201-DPB10501 DPA10201-DPB110601 DPA10201-DPB11501 DPA10201-DPB11601 DPA10201-DPB11901 DPA10201-DPB13401 DPA10201-DPB15501 DPA10202-DPB10101 DPA10202-DPB10201 DPA10202-DPB10202 DPA10202-DPB10401 DPA10202-DPB10501 DPA10202-DPB110601 DPA10202-DPB11301 DPA10202-DPB11901 DPA10202-DPB13101 DPA10202-DPB13801 DPA10202-DPB15501 DPA10202-DPB16501; note = HLAs: DPA10301-DPB10101 DPA10301-DPB10201 DPA10301-DPB10202 DPA10301-DPB10401 DPA10301-DPB10402 DPA10301-DPB110501 DPA10301-DPB110601 DPA10301-DPB11101 DPA10301-DPB11301 DPA10301-DPB11801 DPA10301-DPB12301 DPA10301-DPB13901 DPA10301-DPB14001 DPA10301-DPB14901 DPA10301-DPB15501 DPA10301-DPB16501 DPA10301-DPB17501 DPA10301-DPB18001 DPA10401-DPB10101 DPA10401-DPB10201 DPA10401-DPB10202 DPA10401-DPB10402 DPA10401-DPB10501 DPA10401-DPB110501 DPA10401-DPB14901
KEPPWLWEGYELVPDKWTVQ

SEQ ID NO: 7381 - protein, 20 aa, synthetic construct
  source 1..20: note = Seed: KEPPFLWMGYELHPDKWTVQ; note = HLAs: DRB1_1001 DPA10103-DPB10101 DPA10103-DPB10201 DPA10103-DPB10202 DPA10103-DPB10401 DPA10103-DPB10402 DPA10103-DPB10501 DPA10103-DPB110501 DPA10103-DPB112601 DPA10103-DPB11501 DPA10103-DPB11601 DPA10103-DPB11801 DPA10103-DPB11901 DPA10103-DPB12301 DPA10103-DPB13101 DPA10103-DPB13401 DPA10103-DPB13901 DPA10103-DPB14001 DPA10103-DPB14101 DPA10103-DPB14801 DPA10103-DPB14901 DPA10103-DPB15001 DPA10103-DPB15101 DPA10103-DPB15501 DPA10103-DPB15901 DPA10103-DPB18001 DPA10104-DPB10101 DPA10104-DPB11501 DPA10105-DPB10101 DPA10105-DPB10401 DPA10105-DPB11801 DPA10105-DPB15001 DPA10106-DPB10101 DPA10201-DPB10101 DPA10201-DPB10201 DPA10201-DPB10202 DPA10201-DPB10401 DPA10201-DPB10501 DPA10201-DPB110601 DPA10201-DPB11501 DPA10201-DPB11601 DPA10201-DPB11901 DPA10201-DPB13401 DPA10201-DPB15501 DPA10202-DPB10101 DPA10202-DPB10201 DPA10202-DPB10202 DPA10202-DPB10401 DPA10202-DPB10501 DPA10202-DPB110601 DPA10202-DPB11101 DPA10202-DPB11301 DPA10202-DPB11801 DPA10202-DPB11901 DPA10202-DPB13101; note = HLAs: DPA10202-DPB13801 DPA10202-DPB15501 DPA10202-DPB16501 DPA10301-DPB10101 DPA10301-DPB10201 DPA10301-DPB10202 DPA10301-DPB10401 DPA10301-DPB10402 DPA10301-DPB110501 DPA10301-DPB110601 DPA10301-DPB11101 DPA10301-DPB11301 DPA10301-DPB11801 DPA10301-DPB12301 DPA10301-DPB13901 DPA10301-DPB14001 DPA10301-DPB14901 DPA10301-DPB15501 DPA10301-DPB16501 DPA10301-DPB17501 DPA10301-DPB18001 DPA10401-DPB10101 DPA10401-DPB10201 DPA10401-DPB10202 DPA10401-DPB10402 DPA10401-DPB10501 DPA10401-DPB110501 DPA10401-DPB14901
KEPPFLWGGFELNPDKWTVQ

SEQ ID NO: 7382 - protein, 14 aa, synthetic construct
  source 1..14: note = Seed: PPFLWMGYELHPDK; note = HLAs: DPA10103-DPB10101 DPA10103-DPB10201 DPA10103-DPB10202 DPA10103-DPB10401 DPA10103-DPB112601 DPA10103-DPB11501 DPA10103-DPB11601 DPA10103-DPB11901 DPA10103-DPB12301 DPA10103-DPB13101 DPA10103-DPB13401 DPA10103-DPB13901 DPA10103-DPB14001 DPA10103-DPB14101 DPA10103-DPB14801 DPA10103-DPB15001 DPA10103-DPB15901 DPA10104-DPB10101 DPA10104-DPB11501 DPA10105-DPB10101 DPA10105-DPB10401 DPA10105-DPB15001 DPA10106-DPB10101 DPA10201-DPB10101 DPA10201-DPB110601 DPA10201-DPB11501 DPA10201-DPB11601 DPA10201-DPB11901 DPA10202-DPB10101 DPA10202-DPB10201 DPA10202-DPB10202 DPA10202-DPB10401 DPA10202-DPB110601 DPA10202-DPB11901 DPA10202-DPB13101 DPA10202-DPB16501 DPA10301-DPB10101 DPA10301-DPB10201 DPA10301-DPB10202 DPA10301-DPB10401 DPA10301-DPB10402 DPA10301-DPB110501 DPA10301-DPB110601 DPA10301-DPB11801 DPA10301-DPB12301 DPA10301-DPB13901 DPA10301-DPB14001 DPA10301-DPB14901 DPA10301-DPB15501 DPA10301-DPB16501 DPA10301-DPB17501 DPA10301-DPB18001 DPA10401-DPB10101 DPA10401-DPB10201; note = HLAs: DPA10401-DPB10202 DPA10401-DPB10402 DPA10401-DPB10501 DPA10401-DPB110501 DPA10401-DPB14901
PPFLWDGFELNPDK

SEQ ID NO: 7383 - protein, 14 aa, synthetic construct
  source 1..14: note = Seed: PPFLWMGYELHPDK; note = HLAs: DPA10103-DPB10101 DPA10103-DPB10201 DPA10103-DPB10202 DPA10103-DPB10401 DPA10103-DPB112601 DPA10103-DPB11501 DPA10103-DPB11601 DPA10103-DPB11901 DPA10103-DPB12301 DPA10103-DPB13101 DPA10103-DPB13401 DPA10103-DPB13901 DPA10103-DPB14001 DPA10103-DPB14101 DPA10103-DPB14801 DPA10103-DPB15001 DPA10103-DPB15901 DPA10104-DPB10101 DPA10104-DPB11501 DPA10105-DPB10101 DPA10105-DPB10401 DPA10105-DPB15001 DPA10106-DPB10101 DPA10201-DPB10101 DPA10201-DPB110601 DPA10201-DPB11501 DPA10201-DPB11601 DPA10201-DPB11901 DPA10202-DPB10101 DPA10202-DPB10201 DPA10202-DPB10202 DPA10202-DPB10401 DPA10202-DPB110601 DPA10202-DPB11901 DPA10202-DPB13101 DPA10202-DPB16501 DPA10301-DPB10101 DPA10301-DPB10201 DPA10301-DPB10202 DPA10301-DPB10401 DPA10301-DPB10402 DPA10301-DPB110501 DPA10301-DPB110601 DPA10301-DPB11801 DPA10301-DPB12301 DPA10301-DPB13901 DPA10301-DPB14001 DPA10301-DPB14901 DPA10301-DPB16501 DPA10301-DPB17501 DPA10301-DPB18001 DPA10401-DPB10101 DPA10401-DPB10201 DPA10401-DPB10202; note = HLAs: DPA10401-DPB10402 DPA10401-DPB10501 DPA10401-DPB110501 DPA10401-DPB14901
PPFLWLGFELKPDK

SEQ ID NO: 7384 - protein, 20 aa, synthetic construct
  source 1..20: note = Seed: KEPPFLWMGYELHPDKWTVQ; note = HLAs: DRB1_0101 DPA10103-DPB10101 DPA10103-DPB10201 DPA10103-DPB10202 DPA10103-DPB10401 DPA10103-DPB10402 DPA10103-DPB10501 DPA10103-DPB110501 DPA10103-DPB112601 DPA10103-DPB11501 DPA10103-DPB11601 DPA10103-DPB11801 DPA10103-DPB11901 DPA10103-DPB12301 DPA10103-DPB13101 DPA10103-DPB13401 DPA10103-DPB13901 DPA10103-DPB14001 DPA10103-DPB14101 DPA10103-DPB14801 DPA10103-DPB14901 DPA10103-DPB15001 DPA10103-DPB15101 DPA10103-DPB15501 DPA10103-DPB15901 DPA10103-DPB18001 DPA10104-DPB10101 DPA10104-DPB11501 DPA10105-DPB10101 DPA10105-DPB10401 DPA10105-DPB11801 DPA10105-DPB15001 DPA10106-DPB10101 DPA10201-DPB10101 DPA10201-DPB10201 DPA10201-DPB10202 DPA10201-DPB10401 DPA10201-DPB10501 DPA10201-DPB110601 DPA10201-DPB11501 DPA10201-DPB11601 DPA10201-DPB11901 DPA10201-DPB13401 DPA10201-DPB15501 DPA10202-DPB10101 DPA10202-DPB10201 DPA10202-DPB10202 DPA10202-DPB10401 DPA10202-DPB10501 DPA10202-DPB110601 DPA10202-DPB11101 DPA10202-DPB11301 DPA10202-DPB11801 DPA10202-DPB11901 DPA10202-DPB13101; note = HLAs: DPA10202-DPB13801 DPA10202-DPB15501 DPA10202-DPB16501 DPA10301-DPB10101 DPA10301-DPB10201 DPA10301-DPB10202 DPA10301-DPB10401 DPA10301-DPB10402 DPA10301-DPB110501 DPA10301-DPB110601 DPA10301-DPB11101 DPA10301-DPB11801 DPA10301-DPB12301 DPA10301-DPB13901 DPA10301-DPB14001 DPA10301-DPB14901 DPA10301-DPB16501 DPA10301-DPB17501 DPA10301-DPB18001 DPA10401-DPB10101 DPA10401-DPB10201 DPA10401-DPB10202 DPA10401-DPB10402 DPA10401-DPB10501 DPA10401-DPB110501 DPA10401-DPB14901
KEPPILWAGWELLPDKWTVQ

SEQ ID NO: 7385 - protein, 20 aa, synthetic construct
  source 1..20: note = Seed: KEPPFLWMGYELHPDKWTVQ; note = HLAs: DRB1_1001 DPA10103-DPB10101 DPA10103-DPB10201 DPA10103-DPB10202 DPA10103-DPB10401 DPA10103-DPB10402 DPA10103-DPB10501 DPA10103-DPB110501 DPA10103-DPB112601 DPA10103-DPB11501 DPA10103-DPB11601 DPA10103-DPB11801 DPA10103-DPB11901 DPA10103-DPB12301 DPA10103-DPB13101 DPA10103-DPB13401 DPA10103-DPB13901 DPA10103-DPB14001 DPA10103-DPB14101 DPA10103-DPB14801 DPA10103-DPB14901 DPA10103-DPB15001 DPA10103-DPB15101 DPA10103-DPB15501 DPA10103-DPB15901 DPA10103-DPB18001 DPA10104-DPB10101 DPA10104-DPB11501 DPA10105-DPB10101 DPA10105-DPB10401 DPA10105-DPB11801 DPA10105-DPB15001 DPA10106-DPB10101 DPA10201-DPB10101 DPA10201-DPB10201 DPA10201-DPB10202 DPA10201-DPB10401 DPA10201-DPB10501 DPA10201-DPB110601 DPA10201-DPB11501 DPA10201-DPB11601 DPA10201-DPB11901 DPA10201-DPB13401 DPA10201-DPB15501 DPA10202-DPB10101 DPA10202-DPB10201 DPA10202-DPB10202 DPA10202-DPB10401 DPA10202-DPB10501 DPA10202-DPB110601 DPA10202-DPB11101 DPA10202-DPB11301 DPA10202-DPB11901 DPA10202-DPB13101 DPA10202-DPB13801; note = HLAs: DPA10202-DPB15501 DPA10202-DPB16501 DPA10301-DPB10101 DPA10301-DPB10201 DPA10301-DPB10202 DPA10301-DPB10401 DPA10301-DPB10402 DPA10301-DPB110501 DPA10301-DPB110601 DPA10301-DPB11101 DPA10301-DPB11301 DPA10301-DPB11801 DPA10301-DPB12301 DPA10301-DPB13901 DPA10301-DPB14001 DPA10301-DPB14901 DPA10301-DPB15501 DPA10301-DPB16501 DPA10301-DPB17501 DPA10301-DPB18001 DPA10401-DPB10101 DPA10401-DPB10201 DPA10401-DPB10202 DPA10401-DPB10402 DPA10401-DPB10501 DPA10401-DPB110501 DPA10401-DPB14901
KEPPWLWIGFELEPDKWTVQ

SEQ ID NO: 7386 - protein, 20 aa, synthetic construct
  source 1..20: note = Seed: KEPPFLWMGYELHPDKWTVQ; note = HLAs: DRB1_0101 DRB1_0405 DRB1_1001 DPA10103-DPB10401 DPA10103-DPB10402 DPA10103-DPB10501 DPA10103-DPB110501 DPA10103-DPB112601 DPA10103-DPB11501 DPA10103-DPB11801 DPA10103-DPB12301 DPA10103-DPB13401 DPA10103-DPB13901 DPA10103-DPB14001 DPA10103-DPB14901 DPA10103-DPB15101 DPA10103-DPB15901 DPA10103-DPB18001 DPA10104-DPB11501 DPA10105-DPB10401 DPA10105-DPB11801 DPA10106-DPB10101 DPA10201-DPB10101 DPA10201-DPB10201 DPA10201-DPB10202 DPA10201-DPB10401 DPA10201-DPB10501 DPA10201-DPB11501 DPA10201-DPB11601 DPA10201-DPB13401 DPA10202-DPB10101 DPA10202-DPB10201 DPA10202-DPB10202 DPA10202-DPB10401 DPA10202-DPB10501 DPA10202-DPB110601 DPA10202-DPB11801 DPA10202-DPB11901 DPA10202-DPB13101 DPA10202-DPB13801 DPA10202-DPB16501 DPA10301-DPB10401 DPA10301-DPB10402 DPA10301-DPB110501 DPA10301-DPB11801 DPA10301-DPB12301 DPA10301-DPB13901 DPA10301-DPB14001 DPA10301-DPB14901 DPA10301-DPB17501 DPA10301-DPB18001 DPA10401-DPB10402 DPA10401-DPB110501 DPA10401-DPB14901
KEPPFLWIGHELLPDKWTVQ

SEQ ID NO: 7387 - protein, 20 aa, synthetic construct
  source 1..20: note = Seed: KEPPFLWMGYELHPDKWTVQ; note = HLAs: DPA10103-DPB10101 DPA10103-DPB10201 DPA10103-DPB10202 DPA10103-DPB10401 DPA10103-DPB10402 DPA10103-DPB10501 DPA10103-DPB110501 DPA10103-DPB112601 DPA10103-DPB11501 DPA10103-DPB11601 DPA10103-DPB11801 DPA10103-DPB11901 DPA10103-DPB12301 DPA10103-DPB13101 DPA10103-DPB13401 DPA10103-DPB13901 DPA10103-DPB14001 DPA10103-DPB14101 DPA10103-DPB14801 DPA10103-DPB14901 DPA10103-DPB15001 DPA10103-DPB15101 DPA10103-DPB15501 DPA10103-DPB15901 DPA10103-DPB18001 DPA10104-DPB10101 DPA10104-DPB11501 DPA10105-DPB10101 DPA10105-DPB10401 DPA10105-DPB11801 DPA10105-DPB15001 DPA10106-DPB10101 DPA10201-DPB10101 DPA10201-DPB10201 DPA10201-DPB10202 DPA10201-DPB10401 DPA10201-DPB10501 DPA10201-DPB110601 DPA10201-DPB11501 DPA10201-DPB11601 DPA10201-DPB11901 DPA10201-DPB13401 DPA10202-DPB10101 DPA10202-DPB10201 DPA10202-DPB10202 DPA10202-DPB10401 DPA10202-DPB10501 DPA10202-DPB110601 DPA10202-DPB11301 DPA10202-DPB11801 DPA10202-DPB11901 DPA10202-DPB13101 DPA10202-DPB13801 DPA10202-DPB15501 DPA10202-DPB16501; note = HLAs: DPA10301-DPB10101 DPA10301-DPB10201 DPA10301-DPB10202 DPA10301-DPB10401 DPA10301-DPB10402 DPA10301-DPB110501 DPA10301-DPB110601 DPA10301-DPB11101 DPA10301-DPB11301 DPA10301-DPB11801 DPA10301-DPB12301 DPA10301-DPB13901 DPA10301-DPB14001 DPA10301-DPB14901 DPA10301-DPB15501 DPA10301-DPB16501 DPA10301-DPB17501 DPA10301-DPB18001 DPA10401-DPB10101 DPA10401-DPB10201 DPA10401-DPB10202 DPA10401-DPB10402 DPA10401-DPB10501 DPA10401-DPB110501 DPA10401-DPB14901
KEPPLLWEGWELVPDKWTVQ

SEQ ID NO: 7388 - protein, 20 aa, synthetic construct
  source 1..20: note = Seed: KEPPFLWMGYELHPDKWTVQ; note = HLAs: DRB1_0101 DPA10103-DPB10101 DPA10103-DPB10201 DPA10103-DPB10202 DPA10103-DPB10401 DPA10103-DPB10402 DPA10103-DPB10501 DPA10103-DPB110501 DPA10103-DPB112601 DPA10103-DPB11501 DPA10103-DPB11601 DPA10103-DPB11801 DPA10103-DPB11901 DPA10103-DPB12301 DPA10103-DPB13101 DPA10103-DPB13401 DPA10103-DPB13901 DPA10103-DPB14001 DPA10103-DPB14101 DPA10103-DPB14801 DPA10103-DPB14901 DPA10103-DPB15001 DPA10103-DPB15101 DPA10103-DPB15501 DPA10103-DPB15901 DPA10103-DPB18001 DPA10104-DPB10101 DPA10104-DPB11501 DPA10105-DPB10101 DPA10105-DPB10401 DPA10105-DPB11801 DPA10105-DPB15001 DPA10106-DPB10101 DPA10201-DPB10101 DPA10201-DPB10201 DPA10201-DPB10202 DPA10201-DPB10401 DPA10201-DPB10501 DPA10201-DPB110601 DPA10201-DPB11501 DPA10201-DPB11601 DPA10201-DPB11901 DPA10201-DPB13401 DPA10201-DPB15501 DPA10202-DPB10101 DPA10202-DPB10201 DPA10202-DPB10202 DPA10202-DPB10401 DPA10202-DPB10501 DPA10202-DPB110601 DPA10202-DPB11101 DPA10202-DPB11301 DPA10202-DPB11801 DPA10202-DPB11901 DPA10202-DPB13101; note = HLAs: DPA10202-DPB13801 DPA10202-DPB15501 DPA10202-DPB16501 DPA10301-DPB10101 DPA10301-DPB10201 DPA10301-DPB10202 DPA10301-DPB10401 DPA10301-DPB10402 DPA10301-DPB110501 DPA10301-DPB110601 DPA10301-DPB11101 DPA10301-DPB11301 DPA10301-DPB11801 DPA10301-DPB12301 DPA10301-DPB13901 DPA10301-DPB14001 DPA10301-DPB14901 DPA10301-DPB15501 DPA10301-DPB16501 DPA10301-DPB17501 DPA10301-DPB18001 DPA10401-DPB10101 DPA10401-DPB10201 DPA10401-DPB10202 DPA10401-DPB10402 DPA10401-DPB10501 DPA10401-DPB110501 DPA10401-DPB14901
KEPPYLWSGMELLPDKWTVQ

SEQ ID NO: 7389 - protein, 20 aa, synthetic construct
  source 1..20: note = Seed: KEPPFLWMGYELHPDKWTVQ; note = HLAs: DRB1_0101 DPA10103-DPB10101 DPA10103-DPB10201 DPA10103-DPB10202 DPA10103-DPB10401 DPA10103-DPB10402 DPA10103-DPB10501 DPA10103-DPB110501 DPA10103-DPB112601 DPA10103-DPB11501 DPA10103-DPB11601 DPA10103-DPB11801 DPA10103-DPB11901 DPA10103-DPB12301 DPA10103-DPB13101 DPA10103-DPB13401 DPA10103-DPB13901 DPA10103-DPB14001 DPA10103-DPB14101 DPA10103-DPB14801 DPA10103-DPB14901 DPA10103-DPB15001 DPA10103-DPB15101 DPA10103-DPB15501 DPA10103-DPB15901 DPA10103-DPB18001 DPA10104-DPB10101 DPA10104-DPB11501 DPA10105-DPB10101 DPA10105-DPB10401 DPA10105-DPB11801 DPA10105-DPB15001 DPA10106-DPB10101 DPA10201-DPB10101 DPA10201-DPB10201 DPA10201-DPB10202 DPA10201-DPB10401 DPA10201-DPB10501 DPA10201-DPB110601 DPA10201-DPB11501 DPA10201-DPB11601 DPA10201-DPB11901 DPA10201-DPB13401 DPA10201-DPB15501 DPA10202-DPB10101 DPA10202-DPB10201 DPA10202-DPB10202 DPA10202-DPB10401 DPA10202-DPB10501 DPA10202-DPB110601 DPA10202-DPB11301 DPA10202-DPB11801 DPA10202-DPB11901 DPA10202-DPB13101 DPA10202-DPB13801; note = HLAs: DPA10202-DPB15501 DPA10202-DPB16501 DPA10301-DPB10101 DPA10301-DPB10201 DPA10301-DPB10202 DPA10301-DPB10401 DPA10301-DPB10402 DPA10301-DPB110501 DPA10301-DPB110601 DPA10301-DPB11101 DPA10301-DPB11301 DPA10301-DPB11801 DPA10301-DPB12301 DPA10301-DPB13901 DPA10301-DPB14001 DPA10301-DPB14901 DPA10301-DPB15501 DPA10301-DPB16501 DPA10301-DPB17501 DPA10301-DPB18001 DPA10401-DPB10101 DPA10401-DPB10201 DPA10401-DPB10202 DPA10401-DPB10402 DPA10401-DPB10501 DPA10401-DPB110501 DPA10401-DPB14901
KEPPLLWTGIELIPDKWTVQ

SEQ ID NO: 7390 - protein, 20 aa, synthetic construct
  source 1..20: note = Seed: KEPPFLWMGYELHPDKWTVQ; note = HLAs: DPA10103-DPB10101 DPA10103-DPB10201 DPA10103-DPB10202 DPA10103-DPB10401 DPA10103-DPB10402 DPA10103-DPB10501 DPA10103-DPB110501 DPA10103-DPB112601 DPA10103-DPB11501 DPA10103-DPB11601 DPA10103-DPB11801 DPA10103-DPB11901 DPA10103-DPB12301 DPA10103-DPB13101 DPA10103-DPB13401 DPA10103-DPB13901 DPA10103-DPB14001 DPA10103-DPB14101 DPA10103-DPB14801 DPA10103-DPB14901 DPA10103-DPB15001 DPA10103-DPB15101 DPA10103-DPB15501 DPA10103-DPB15901 DPA10103-DPB18001 DPA10104-DPB10101 DPA10104-DPB11501 DPA10105-DPB10101 DPA10105-DPB10401 DPA10105-DPB11801 DPA10105-DPB15001 DPA10106-DPB10101 DPA10201-DPB10101 DPA10201-DPB10201 DPA10201-DPB10202 DPA10201-DPB10401 DPA10201-DPB110601 DPA10201-DPB11501 DPA10201-DPB11601 DPA10201-DPB11901 DPA10201-DPB13401 DPA10201-DPB15501 DPA10202-DPB10101 DPA10202-DPB10201 DPA10202-DPB10202 DPA10202-DPB10401 DPA10202-DPB10501 DPA10202-DPB110601 DPA10202-DPB11101 DPA10202-DPB11301 DPA10202-DPB11901 DPA10202-DPB13101 DPA10202-DPB13801 DPA10202-DPB15501 DPA10202-DPB16501; note = HLAs: DPA10301-DPB10101 DPA10301-DPB10201 DPA10301-DPB10202 DPA10301-DPB10401 DPA10301-DPB10402 DPA10301-DPB110501 DPA10301-DPB110601 DPA10301-DPB11101 DPA10301-DPB11301 DPA10301-DPB11801 DPA10301-DPB12301 DPA10301-DPB13901 DPA10301-DPB14001 DPA10301-DPB14901 DPA10301-DPB15501 DPA10301-DPB16501 DPA10301-DPB17501 DPA10301-DPB18001 DPA10401-DPB10101 DPA10401-DPB10201 DPA10401-DPB10202 DPA10401-DPB10402 DPA10401-DPB10501 DPA10401-DPB110501 DPA10401-DPB14901
KEPPLLWSGFELDPDKWTVQ

SEQ ID NO: 7391 - protein, 20 aa, synthetic construct
  source 1..20: note = Seed: KEPPFLWMGYELHPDKWTVQ; note = HLAs: DRB1_0101 DRB1_1001 DPA10103-DPB11501 DPA10103-DPB11801 DPA10103-DPB13401 DPA10104-DPB11501 DPA10105-DPB11801 DPA10106-DPB10101 DPA10201-DPB10101 DPA10201-DPB11501 DPA10201-DPB11601 DPA10202-DPB110601 DPA10202-DPB11801 DPA10202-DPB11901 DPA10301-DPB10201 DPA10301-DPB10202 DPA10301-DPB10402 DPA10301-DPB110501 DPA10301-DPB11801 DPA10301-DPB14001 DPA10301-DPB14901 DPA10301-DPB17501 DPA10301-DPB18001
KEPPVLWMGIELLPDKWTVQ

SEQ ID NO: 7392 - protein, 20 aa, synthetic construct
  source 1..20: note = Seed: KEPPFLWMGYELHPDKWTVQ; note = HLAs: DRB1_0101 DRB1_1001 DPA10103-DPB10101 DPA10103-DPB10201 DPA10103-DPB10202 DPA10103-DPB10401 DPA10103-DPB10402 DPA10103-DPB10501 DPA10103-DPB110501 DPA10103-DPB112601 DPA10103-DPB11501 DPA10103-DPB11601 DPA10103-DPB11801 DPA10103-DPB11901 DPA10103-DPB12301 DPA10103-DPB13101 DPA10103-DPB13401 DPA10103-DPB13901 DPA10103-DPB14001 DPA10103-DPB14101 DPA10103-DPB14801 DPA10103-DPB14901 DPA10103-DPB15001 DPA10103-DPB15101 DPA10103-DPB15501 DPA10103-DPB15901 DPA10103-DPB18001 DPA10104-DPB10101 DPA10104-DPB11501 DPA10105-DPB10101 DPA10105-DPB10401 DPA10105-DPB11801 DPA10105-DPB15001 DPA10106-DPB10101 DPA10201-DPB10101 DPA10201-DPB10201 DPA10201-DPB10202 DPA10201-DPB10401 DPA10201-DPB10501 DPA10201-DPB110601 DPA10201-DPB11501 DPA10201-DPB11601 DPA10201-DPB11901 DPA10201-DPB13401 DPA10201-DPB15501 DPA10202-DPB10101 DPA10202-DPB10201 DPA10202-DPB10202 DPA10202-DPB10401 DPA10202-DPB10501 DPA10202-DPB110601 DPA10202-DPB11101 DPA10202-DPB11301 DPA10202-DPB11801 DPA10202-DPB11901; note = HLAs: DPA10202-DPB13101 DPA10202-DPB13801 DPA10202-DPB15501 DPA10202-DPB16501 DPA10301-DPB10101 DPA10301-DPB10201 DPA10301-DPB10202 DPA10301-DPB10401 DPA10301-DPB10402 DPA10301-DPB110501 DPA10301-DPB110601 DPA10301-DPB11101 DPA10301-DPB11301 DPA10301-DPB11801 DPA10301-DPB12301 DPA10301-DPB13901 DPA10301-DPB14001 DPA10301-DPB14901 DPA10301-DPB15501 DPA10301-DPB16501 DPA10301-DPB17501 DPA10301-DPB18001 DPA10401-DPB10101 DPA10401-DPB10201 DPA10401-DPB10202 DPA10401-DPB10402 DPA10401-DPB10501 DPA10401-DPB110501 DPA10401-DPB14901
KEPPFLWAGMELMPDKWTVQ

SEQ ID NO: 7393 - protein, 20 aa, synthetic construct
  source 1..20: note = Seed: KEPPFLWMGYELHPDKWTVQ; note = HLAs: DPA10103-DPB10101 DPA10103-DPB10201 DPA10103-DPB10202 DPA10103-DPB10401 DPA10103-DPB10402 DPA10103-DPB10501 DPA10103-DPB110501 DPA10103-DPB112601 DPA10103-DPB11501 DPA10103-DPB11601 DPA10103-DPB11801 DPA10103-DPB11901 DPA10103-DPB12301 DPA10103-DPB13101 DPA10103-DPB13401 DPA10103-DPB13901 DPA10103-DPB14001 DPA10103-DPB14101 DPA10103-DPB14801 DPA10103-DPB14901 DPA10103-DPB15001 DPA10103-DPB15101 DPA10103-DPB15501 DPA10103-DPB15901 DPA10103-DPB18001 DPA10104-DPB10101 DPA10104-DPB11501 DPA10105-DPB10101 DPA10105-DPB10401 DPA10105-DPB11801 DPA10105-DPB15001 DPA10106-DPB10101 DPA10201-DPB10101 DPA10201-DPB10201 DPA10201-DPB10202 DPA10201-DPB10401 DPA10201-DPB10501 DPA10201-DPB110601 DPA10201-DPB11501 DPA10201-DPB11601 DPA10201-DPB11901 DPA10201-DPB13401 DPA10201-DPB15501 DPA10202-DPB10101 DPA10202-DPB10201 DPA10202-DPB10202 DPA10202-DPB10401 DPA10202-DPB10501 DPA10202-DPB110601 DPA10202-DPB11101 DPA10202-DPB11301 DPA10202-DPB11901 DPA10202-DPB13101 DPA10202-DPB13801 DPA10202-DPB15501; note = HLAs: DPA10202-DPB16501 DPA10301-DPB10101 DPA10301-DPB10201 DPA10301-DPB10202 DPA10301-DPB10401 DPA10301-DPB10402 DPA10301-DPB110501 DPA10301-DPB110601 DPA10301-DPB11101 DPA10301-DPB11301 DPA10301-DPB11801 DPA10301-DPB12301 DPA10301-DPB13901 DPA10301-DPB14001 DPA10301-DPB14901 DPA10301-DPB15501 DPA10301-DPB16501 DPA10301-DPB17501 DPA10301-DPB18001 DPA10401-DPB10101 DPA10401-DPB10201 DPA10401-DPB10202 DPA10401-DPB10402 DPA10401-DPB10501 DPA10401-DPB110501 DPA10401-DPB14901
KEPPFLWTGYELEPDKWTVQ

SEQ ID NO: 7394 - protein, 20 aa, synthetic construct
  source 1..20: note = Seed: KEPPFLWMGYELHPDKWTVQ; note = HLAs: DPA10103-DPB10101 DPA10103-DPB10201 DPA10103-DPB10202 DPA10103-DPB10401 DPA10103-DPB10402 DPA10103-DPB10501 DPA10103-DPB110501 DPA10103-DPB112601 DPA10103-DPB11501 DPA10103-DPB11601 DPA10103-DPB11801 DPA10103-DPB11901 DPA10103-DPB12301 DPA10103-DPB13101 DPA10103-DPB13401 DPA10103-DPB13901 DPA10103-DPB14001 DPA10103-DPB14101 DPA10103-DPB14801 DPA10103-DPB14901 DPA10103-DPB15001 DPA10103-DPB15101 DPA10103-DPB15501 DPA10103-DPB15901 DPA10103-DPB18001 DPA10104-DPB10101 DPA10104-DPB11501 DPA10105-DPB10101 DPA10105-DPB10401 DPA10105-DPB11801 DPA10105-DPB15001 DPA10106-DPB10101 DPA10201-DPB10101 DPA10201-DPB10201 DPA10201-DPB10202 DPA10201-DPB10401 DPA10201-DPB10501 DPA10201-DPB110601 DPA10201-DPB11501 DPA10201-DPB11601 DPA10201-DPB11901 DPA10201-DPB13401 DPA10201-DPB15501 DPA10202-DPB10101 DPA10202-DPB10201 DPA10202-DPB10202 DPA10202-DPB10401 DPA10202-DPB10501 DPA10202-DPB110601 DPA10202-DPB11101 DPA10202-DPB11301 DPA10202-DPB11801 DPA10202-DPB11901 DPA10202-DPB13101 DPA10202-DPB13801; note = HLAs: DPA10202-DPB15501 DPA10202-DPB16501 DPA10301-DPB10101 DPA10301-DPB10201 DPA10301-DPB10202 DPA10301-DPB10401 DPA10301-DPB10402 DPA10301-DPB110501 DPA10301-DPB110601 DPA10301-DPB11101 DPA10301-DPB11301 DPA10301-DPB11801 DPA10301-DPB12301 DPA10301-DPB13901 DPA10301-DPB14001 DPA10301-DPB14901 DPA10301-DPB15501 DPA10301-DPB16501 DPA10301-DPB17501 DPA10301-DPB18001 DPA10401-DPB10101 DPA10401-DPB10201 DPA10401-DPB10202 DPA10401-DPB10402 DPA10401-DPB10501 DPA10401-DPB110501 DPA10401-DPB14901
KEPPLLWTGWELMPDKWTVQ

SEQ ID NO: 7395 - protein, 20 aa, synthetic construct
  source 1..20: note = Seed: KEPPFLWMGYELHPDKWTVQ; note = HLAs: DRB1_0101 DPA10103-DPB10101 DPA10103-DPB10201 DPA10103-DPB10202 DPA10103-DPB10401 DPA10103-DPB10402 DPA10103-DPB10501 DPA10103-DPB110501 DPA10103-DPB112601 DPA10103-DPB11501 DPA10103-DPB11601 DPA10103-DPB11801 DPA10103-DPB11901 DPA10103-DPB12301 DPA10103-DPB13101 DPA10103-DPB13401 DPA10103-DPB13901 DPA10103-DPB14001 DPA10103-DPB14101 DPA10103-DPB14801 DPA10103-DPB14901 DPA10103-DPB15001 DPA10103-DPB15101 DPA10103-DPB15501 DPA10103-DPB15901 DPA10103-DPB18001 DPA10104-DPB10101 DPA10104-DPB11501 DPA10105-DPB10101 DPA10105-DPB10401 DPA10105-DPB11801 DPA10105-DPB15001 DPA10106-DPB10101 DPA10201-DPB10101 DPA10201-DPB10201 DPA10201-DPB10202 DPA10201-DPB10401 DPA10201-DPB10501 DPA10201-DPB110601 DPA10201-DPB11501 DPA10201-DPB11601 DPA10201-DPB11901 DPA10201-DPB13401 DPA10201-DPB15501 DPA10202-DPB10101 DPA10202-DPB10201 DPA10202-DPB10202 DPA10202-DPB10401 DPA10202-DPB10501 DPA10202-DPB110601 DPA10202-DPB11101 DPA10202-DPB11301 DPA10202-DPB11801 DPA10202-DPB11901 DPA10202-DPB13101; note = HLAs: DPA10202-DPB13801 DPA10202-DPB15501 DPA10202-DPB16501 DPA10301-DPB10101 DPA10301-DPB10201 DPA10301-DPB10202 DPA10301-DPB10401 DPA10301-DPB10402 DPA10301-DPB110501 DPA10301-DPB110601 DPA10301-DPB11101 DPA10301-DPB11301 DPA10301-DPB11801 DPA10301-DPB12301 DPA10301-DPB13901 DPA10301-DPB14001 DPA10301-DPB14901 DPA10301-DPB15501 DPA10301-DPB16501 DPA10301-DPB17501 DPA10301-DPB18001 DPA10401-DPB10101 DPA10401-DPB10201 DPA10401-DPB10202 DPA10401-DPB10402 DPA10401-DPB10501 DPA10401-DPB110501 DPA10401-DPB14901
KEPPFLWTGMELTPDKWTVQ

SEQ ID NO: 7396 - protein, 14 aa, synthetic construct
  source 1..14: note = Seed: PPFLWMGYELHPDK; note = HLAs: DPA10103-DPB10101 DPA10103-DPB10201 DPA10103-DPB10202 DPA10103-DPB10401 DPA10103-DPB112601 DPA10103-DPB11501 DPA10103-DPB11601 DPA10103-DPB11901 DPA10103-DPB12301 DPA10103-DPB13101 DPA10103-DPB13401 DPA10103-DPB13901 DPA10103-DPB14001 DPA10103-DPB14101 DPA10103-DPB14801 DPA10103-DPB15001 DPA10103-DPB15901 DPA10104-DPB10101 DPA10104-DPB11501 DPA10105-DPB10101 DPA10105-DPB10401 DPA10105-DPB15001 DPA10106-DPB10101 DPA10201-DPB10101 DPA10201-DPB110601 DPA10201-DPB11501 DPA10201-DPB11601 DPA10201-DPB11901 DPA10202-DPB10101 DPA10202-DPB10201 DPA10202-DPB10202 DPA10202-DPB10401 DPA10202-DPB110601 DPA10202-DPB11901 DPA10202-DPB13101 DPA10202-DPB16501 DPA10301-DPB10101 DPA10301-DPB10201 DPA10301-DPB10202 DPA10301-DPB10401 DPA10301-DPB10402 DPA10301-DPB110501 DPA10301-DPB110601 DPA10301-DPB11801 DPA10301-DPB12301 DPA10301-DPB13901 DPA10301-DPB14001 DPA10301-DPB14901 DPA10301-DPB15501 DPA10301-DPB16501 DPA10301-DPB17501 DPA10301-DPB18001 DPA10401-DPB10101 DPA10401-DPB10201; note = HLAs: DPA10401-DPB10202 DPA10401-DPB10402 DPA10401-DPB10501 DPA10401-DPB110501 DPA10401-DPB14901
PPLLWTGWELFPDK

SEQ ID NO: 7397 - protein, 20 aa, synthetic construct
  source 1..20: note = Seed: KEPPFLWMGYELHPDKWTVQ; note = HLAs: DPA10103-DPB10101 DPA10103-DPB10201 DPA10103-DPB10202 DPA10103-DPB10401 DPA10103-DPB10402 DPA10103-DPB10501 DPA10103-DPB110501 DPA10103-DPB112601 DPA10103-DPB11501 DPA10103-DPB11601 DPA10103-DPB11801 DPA10103-DPB11901 DPA10103-DPB12301 DPA10103-DPB13101 DPA10103-DPB13401 DPA10103-DPB13901 DPA10103-DPB14001 DPA10103-DPB14101 DPA10103-DPB14801 DPA10103-DPB14901 DPA10103-DPB15001 DPA10103-DPB15101 DPA10103-DPB15501 DPA10103-DPB15901 DPA10103-DPB18001 DPA10104-DPB10101 DPA10104-DPB11501 DPA10105-DPB10101 DPA10105-DPB10401 DPA10105-DPB11801 DPA10105-DPB15001 DPA10106-DPB10101 DPA10201-DPB10101 DPA10201-DPB10201 DPA10201-DPB10202 DPA10201-DPB10401 DPA10201-DPB10501 DPA10201-DPB110601 DPA10201-DPB11501 DPA10201-DPB11601 DPA10201-DPB11901 DPA10201-DPB13401 DPA10201-DPB15501 DPA10202-DPB10101 DPA10202-DPB10201 DPA10202-DPB10202 DPA10202-DPB10401 DPA10202-DPB10501 DPA10202-DPB110601 DPA10202-DPB11101 DPA10202-DPB11301 DPA10202-DPB11801 DPA10202-DPB11901 DPA10202-DPB13101 DPA10202-DPB13801; note = HLAs: DPA10202-DPB15501 DPA10202-DPB16501 DPA10301-DPB10101 DPA10301-DPB10201 DPA10301-DPB10202 DPA10301-DPB10401 DPA10301-DPB10402 DPA10301-DPB110501 DPA10301-DPB110601 DPA10301-DPB11301 DPA10301-DPB11801 DPA10301-DPB12301 DPA10301-DPB13901 DPA10301-DPB14001 DPA10301-DPB14901 DPA10301-DPB16501 DPA10301-DPB17501 DPA10301-DPB18001 DPA10401-DPB10101 DPA10401-DPB10201 DPA10401-DPB10202 DPA10401-DPB10402 DPA10401-DPB10501 DPA10401-DPB110501 DPA10401-DPB14901
KEPPFLWRGFELNPDKWTVQ

SEQ ID NO: 7398 - protein, 20 aa, synthetic construct
  source 1..20: note = Seed: KEPPFLWMGYELHPDKWTVQ; note = HLAs: DRB1_1602 DQA10101-DQB10501 DQA10101-DQB10503 DQA10102-DQB10501 DQA10102-DQB10502 DQA10102-DQB10503 DQA10103-DQB10501 DQA10104-DQB10501 DQA10104-DQB10503 DQA10105-DQB10501 DQA10107-DQB10503 DQA10505-DQB10402
KEPPFLWMGFEAHPAKWTVQ

SEQ ID NO: 7399 - protein, 20 aa, synthetic construct
  source 1..20: note = Seed: KEPPFLWMGYELHPDKWTVQ; note = HLAs: DRB1_0101 DPA10103-DPB10201 DPA10103-DPB10202 DPA10103-DPB11801 DPA10103-DPB13401 DPA10103-DPB14001 DPA10103-DPB14801 DPA10105-DPB11801 DPA10201-DPB10201 DPA10201-DPB110601 DPA10201-DPB11501 DPA10201-DPB11601 DPA10201-DPB11901 DPA10201-DPB13401 DPA10201-DPB15501 DPA10202-DPB10501 DPA10202-DPB110601 DPA10202-DPB11801 DPA10202-DPB11901 DPA10202-DPB13801 DPA10301-DPB10201 DPA10301-DPB10202 DPA10301-DPB110601 DPA10301-DPB11301 DPA10301-DPB11801 DPA10301-DPB14001 DPA10401-DPB10201 DPA10401-DPB10202
KEPPLLWWGIELLPDKWTVQ

SEQ ID NO: 7400 - protein, 20 aa, synthetic construct
  source 1..20: note = Seed: KEPPFLWMGYELHPDKWTVQ; note = HLAs: DPA10103-DPB10101 DPA10103-DPB10201 DPA10103-DPB10202 DPA10103-DPB10401 DPA10103-DPB10402 DPA10103-DPB10501 DPA10103-DPB110501 DPA10103-DPB112601 DPA10103-DPB11501 DPA10103-DPB11601 DPA10103-DPB11801 DPA10103-DPB11901 DPA10103-DPB12301 DPA10103-DPB13101 DPA10103-DPB13401 DPA10103-DPB13901 DPA10103-DPB14001 DPA10103-DPB14101 DPA10103-DPB14801 DPA10103-DPB14901 DPA10103-DPB15001 DPA10103-DPB15101 DPA10103-DPB15501 DPA10103-DPB15901 DPA10103-DPB18001 DPA10104-DPB10101 DPA10104-DPB11501 DPA10105-DPB10101 DPA10105-DPB10401 DPA10105-DPB11801 DPA10105-DPB15001 DPA10106-DPB10101 DPA10201-DPB10101 DPA10201-DPB10201 DPA10201-DPB10202 DPA10201-DPB10401 DPA10201-DPB10501 DPA10201-DPB110601 DPA10201-DPB11501 DPA10201-DPB11601 DPA10201-DPB11901 DPA10201-DPB13401 DPA10201-DPB15501 DPA10202-DPB10101 DPA10202-DPB10201 DPA10202-DPB10202 DPA10202-DPB10401 DPA10202-DPB10501 DPA10202-DPB110601 DPA10202-DPB11101 DPA10202-DPB11301 DPA10202-DPB11901 DPA10202-DPB13101 DPA10202-DPB13801 DPA10202-DPB15501; note = HLAs: DPA10202-DPB16501 DPA10301-DPB10101 DPA10301-DPB10201 DPA10301-DPB10202 DPA10301-DPB10401 DPA10301-DPB10402 DPA10301-DPB110501 DPA10301-DPB110601 DPA10301-DPB11101 DPA10301-DPB11301 DPA10301-DPB11801 DPA10301-DPB12301 DPA10301-DPB13901 DPA10301-DPB14001 DPA10301-DPB14901 DPA10301-DPB15501 DPA10301-DPB16501 DPA10301-DPB17501 DPA10301-DPB18001 DPA10401-DPB10101 DPA10401-DPB10201 DPA10401-DPB10202 DPA10401-DPB10402 DPA10401-DPB10501 DPA10401-DPB110501 DPA10401-DPB14901
KEPPYLWTGFELDPDKWTVQ

SEQ ID NO: 7401 - protein, 20 aa, synthetic construct
  source 1..20: note = Seed: KEPPFLWMGYELHPDKWTVQ; note = HLAs: DRB1_0101 DRB1_0405 DRB1_1001 DPA10103-DPB10402 DPA10103-DPB110501 DPA10103-DPB11501 DPA10103-DPB11801 DPA10103-DPB13401 DPA10103-DPB14901 DPA10103-DPB15101 DPA10103-DPB15901 DPA10103-DPB18001 DPA10104-DPB11501 DPA10105-DPB11801 DPA10106-DPB10101 DPA10201-DPB10101 DPA10201-DPB10201 DPA10201-DPB10202 DPA10201-DPB10401 DPA10201-DPB10501 DPA10201-DPB110601 DPA10201-DPB11501 DPA10201-DPB11601 DPA10201-DPB11901 DPA10201-DPB13401 DPA10201-DPB15501 DPA10202-DPB10101 DPA10202-DPB10201 DPA10202-DPB10202 DPA10202-DPB10401 DPA10202-DPB10501 DPA10202-DPB110601 DPA10202-DPB11101 DPA10202-DPB11301 DPA10202-DPB11801 DPA10202-DPB11901 DPA10202-DPB13101 DPA10202-DPB13801 DPA10202-DPB15501 DPA10202-DPB16501 DPA10301-DPB10201 DPA10301-DPB10202 DPA10301-DPB10402 DPA10301-DPB110501 DPA10301-DPB11801 DPA10301-DPB14001 DPA10301-DPB14901 DPA10301-DPB17501 DPA10301-DPB18001 DPA10401-DPB10402 DPA10401-DPB110501 DPA10401-DPB14901
KEPPFLWLGTELLPDKWTVQ

SEQ ID NO: 7402 - protein, 20 aa, synthetic construct
  source 1..20: note = Seed: KEPPFLWMGYELHPDKWTVQ; note = HLAs: DPA10103-DPB10201 DPA10103-DPB10202 DPA10103-DPB10401 DPA10103-DPB10402 DPA10103-DPB10501 DPA10103-DPB110501 DPA10103-DPB112601 DPA10103-DPB11501 DPA10103-DPB11601 DPA10103-DPB11801 DPA10103-DPB11901 DPA10103-DPB12301 DPA10103-DPB13101 DPA10103-DPB13401 DPA10103-DPB13901 DPA10103-DPB14001 DPA10103-DPB14801 DPA10103-DPB14901 DPA10103-DPB15101 DPA10103-DPB15901 DPA10103-DPB18001 DPA10104-DPB11501 DPA10105-DPB10401 DPA10105-DPB11801 DPA10106-DPB10101 DPA10201-DPB10101 DPA10201-DPB10201 DPA10201-DPB10202 DPA10201-DPB10401 DPA10201-DPB10501 DPA10201-DPB110601 DPA10201-DPB11501 DPA10201-DPB11601 DPA10201-DPB11901 DPA10201-DPB13401 DPA10202-DPB10202 DPA10202-DPB10501 DPA10202-DPB110601 DPA10202-DPB11801 DPA10202-DPB11901 DPA10202-DPB13801 DPA10301-DPB10101 DPA10301-DPB10201 DPA10301-DPB10202 DPA10301-DPB110601 DPA10301-DPB11801 DPA10301-DPB14001 DPA10401-DPB10201 DPA10401-DPB10202 DPA10401-DPB10402 DPA10401-DPB110501 DPA10401-DPB14901
KEPPFLWYGIELFPDKWTVQ

SEQ ID NO: 7403 - protein, 20 aa, synthetic construct
  source 1..20: note = Seed: KEPPFLWMGYELHPDKWTVQ; note = HLAs: DRB1_0101 DRB1_0405 DRB1_1001 DPA10103-DPB10101 DPA10103-DPB10201 DPA10103-DPB10202 DPA10103-DPB10401 DPA10103-DPB10402 DPA10103-DPB10501 DPA10103-DPB110501 DPA10103-DPB112601 DPA10103-DPB11501 DPA10103-DPB11601 DPA10103-DPB11801 DPA10103-DPB11901 DPA10103-DPB12301 DPA10103-DPB13101 DPA10103-DPB13401 DPA10103-DPB13901 DPA10103-DPB14001 DPA10103-DPB14101 DPA10103-DPB14801 DPA10103-DPB14901 DPA10103-DPB15001 DPA10103-DPB15101 DPA10103-DPB15501 DPA10103-DPB15901 DPA10103-DPB18001 DPA10104-DPB10101 DPA10104-DPB11501 DPA10105-DPB10101 DPA10105-DPB10401 DPA10105-DPB11801 DPA10105-DPB15001 DPA10106-DPB10101 DPA10201-DPB10101 DPA10201-DPB10201 DPA10201-DPB10202 DPA10201-DPB10401 DPA10201-DPB10501 DPA10201-DPB110601 DPA10201-DPB11501 DPA10201-DPB11601 DPA10201-DPB11901 DPA10201-DPB15501 DPA10202-DPB10101 DPA10202-DPB10201 DPA10202-DPB10202 DPA10202-DPB10401 DPA10202-DPB10501 DPA10202-DPB110601 DPA10202-DPB11101 DPA10202-DPB11301 DPA10202-DPB11801 DPA10202-DPB11901 DPA10202-DPB13101; note = HLAs: DPA10202-DPB13801 DPA10202-DPB15501 DPA10202-DPB16501 DPA10301-DPB10101 DPA10301-DPB10201 DPA10301-DPB10202 DPA10301-DPB10401 DPA10301-DPB10402 DPA10301-DPB110501 DPA10301-DPB110601 DPA10301-DPB11101 DPA10301-DPB11301 DPA10301-DPB11801 DPA10301-DPB12301 DPA10301-DPB13901 DPA10301-DPB14001 DPA10301-DPB14901 DPA10301-DPB15501 DPA10301-DPB16501 DPA10301-DPB17501 DPA10301-DPB18001 DPA10401-DPB10101 DPA10401-DPB10201 DPA10401-DPB10202 DPA10401-DPB10402 DPA10401-DPB10501 DPA10401-DPB110501 DPA10401-DPB14901
KEPPFLWEGAELIPDKWTVQ

SEQ ID NO: 7404 - protein, 20 aa, synthetic construct
  source 1..20: note = Seed: KEPPFLWMGYELHPDKWTVQ; note = HLAs: DRB1_0101 DRB1_1001 DPA10103-DPB10101 DPA10103-DPB10201 DPA10103-DPB10202 DPA10103-DPB10401 DPA10103-DPB10402 DPA10103-DPB10501 DPA10103-DPB110501 DPA10103-DPB112601 DPA10103-DPB11501 DPA10103-DPB11601 DPA10103-DPB11801 DPA10103-DPB11901 DPA10103-DPB12301 DPA10103-DPB13101 DPA10103-DPB13401 DPA10103-DPB13901 DPA10103-DPB14001 DPA10103-DPB14101 DPA10103-DPB14801 DPA10103-DPB14901 DPA10103-DPB15001 DPA10103-DPB15101 DPA10103-DPB15501 DPA10103-DPB15901 DPA10103-DPB18001 DPA10104-DPB10101 DPA10104-DPB11501 DPA10105-DPB10101 DPA10105-DPB10401 DPA10105-DPB11801 DPA10105-DPB15001 DPA10106-DPB10101 DPA10201-DPB10101 DPA10201-DPB10201 DPA10201-DPB10202 DPA10201-DPB10401 DPA10201-DPB10501 DPA10201-DPB110601 DPA10201-DPB11501 DPA10201-DPB11601 DPA10201-DPB11901 DPA10201-DPB13401 DPA10201-DPB15501 DPA10202-DPB10101 DPA10202-DPB10201 DPA10202-DPB10202 DPA10202-DPB10401 DPA10202-DPB10501 DPA10202-DPB110601 DPA10202-DPB11101 DPA10202-DPB11301 DPA10202-DPB11801 DPA10202-DPB11901; note = HLAs: DPA10202-DPB13101 DPA10202-DPB13801 DPA10202-DPB15501 DPA10202-DPB16501 DPA10301-DPB10101 DPA10301-DPB10201 DPA10301-DPB10202 DPA10301-DPB10401 DPA10301-DPB10402 DPA10301-DPB110501 DPA10301-DPB110601 DPA10301-DPB11101 DPA10301-DPB11301 DPA10301-DPB11801 DPA10301-DPB12301 DPA10301-DPB13901 DPA10301-DPB14001 DPA10301-DPB14901 DPA10301-DPB15501 DPA10301-DPB16501 DPA10301-DPB17501 DPA10301-DPB18001 DPA10401-DPB10101 DPA10401-DPB10201 DPA10401-DPB10202 DPA10401-DPB10402 DPA10401-DPB10501 DPA10401-DPB110501 DPA10401-DPB14901
KEPPFLWHGAELIPDKWTVQ

SEQ ID NO: 7405 - protein, 20 aa, synthetic construct
  source 1..20: note = Seed: KEPPFLWMGYELHPDKWTVQ; note = HLAs: DPA10103-DPB10101 DPA10103-DPB10201 DPA10103-DPB10202 DPA10103-DPB10401 DPA10103-DPB10501 DPA10103-DPB112601 DPA10103-DPB11601 DPA10103-DPB11901 DPA10103-DPB12301 DPA10103-DPB13101 DPA10103-DPB13401 DPA10103-DPB13901 DPA10103-DPB14001 DPA10103-DPB14101 DPA10103-DPB14801 DPA10103-DPB15001 DPA10104-DPB10101 DPA10105-DPB10101 DPA10105-DPB10401 DPA10105-DPB15001 DPA10201-DPB10201 DPA10201-DPB10501 DPA10201-DPB110601 DPA10201-DPB11601 DPA10201-DPB11901 DPA10201-DPB13401 DPA10201-DPB15501 DPA10202-DPB10101 DPA10202-DPB10201 DPA10202-DPB10202 DPA10202-DPB10401 DPA10202-DPB10501 DPA10202-DPB110601 DPA10202-DPB11301 DPA10202-DPB11801 DPA10202-DPB11901 DPA10202-DPB13101 DPA10202-DPB13801 DPA10202-DPB15501 DPA10202-DPB16501 DPA10301-DPB10101 DPA10301-DPB10201 DPA10301-DPB10202 DPA10301-DPB110601 DPA10301-DPB14001 DPA10301-DPB16501 DPA10301-DPB17501 DPA10401-DPB10101 DPA10401-DPB10201 DPA10401-DPB10202 DPA10401-DPB10402 DPA10401-DPB10501 DPA10401-DPB110501 DPA10401-DPB14901
KEPPQLWIGFELLPDKWTVQ

SEQ ID NO: 7406 - protein, 20 aa, synthetic construct
  source 1..20: note = Seed: KEPPFLWMGYELHPDKWTVQ; note = HLAs: DPA10103-DPB10101 DPA10103-DPB10201 DPA10103-DPB10202 DPA10103-DPB10401 DPA10103-DPB10402 DPA10103-DPB10501 DPA10103-DPB110501 DPA10103-DPB112601 DPA10103-DPB11501 DPA10103-DPB11601 DPA10103-DPB11801 DPA10103-DPB11901 DPA10103-DPB12301 DPA10103-DPB13101 DPA10103-DPB13401 DPA10103-DPB13901 DPA10103-DPB14001 DPA10103-DPB14101 DPA10103-DPB14801 DPA10103-DPB14901 DPA10103-DPB15001 DPA10103-DPB15101 DPA10103-DPB15501 DPA10103-DPB15901 DPA10103-DPB18001 DPA10104-DPB10101 DPA10104-DPB11501 DPA10105-DPB10101 DPA10105-DPB10401 DPA10105-DPB11801 DPA10105-DPB15001 DPA10106-DPB10101 DPA10201-DPB10101 DPA10201-DPB10201 DPA10201-DPB10202 DPA10201-DPB10401 DPA10201-DPB10501 DPA10201-DPB110601 DPA10201-DPB11501 DPA10201-DPB11601 DPA10201-DPB11901 DPA10201-DPB13401 DPA10202-DPB10101 DPA10202-DPB10201 DPA10202-DPB10202 DPA10202-DPB10401 DPA10202-DPB10501 DPA10202-DPB110601 DPA10202-DPB11801 DPA10202-DPB11901 DPA10202-DPB13101 DPA10202-DPB13801 DPA10202-DPB15501 DPA10202-DPB16501 DPA10301-DPB10101; note = HLAs: DPA10301-DPB10201 DPA10301-DPB10202 DPA10301-DPB10401 DPA10301-DPB10402 DPA10301-DPB110501 DPA10301-DPB110601 DPA10301-DPB11101 DPA10301-DPB11801 DPA10301-DPB12301 DPA10301-DPB13901 DPA10301-DPB14001 DPA10301-DPB14901 DPA10301-DPB15501 DPA10301-DPB16501 DPA10301-DPB17501 DPA10301-DPB18001 DPA10401-DPB10101 DPA10401-DPB10201 DPA10401-DPB10202 DPA10401-DPB10402 DPA10401-DPB10501 DPA10401-DPB110501 DPA10401-DPB14901
KEPPMLWEGFELTPDKWTVQ

SEQ ID NO: 7407 - protein, 20 aa, synthetic construct
  source 1..20: note = Seed: KEPPFLWMGYELHPDKWTVQ; note = HLAs: DPA10103-DPB10101 DPA10103-DPB10201 DPA10103-DPB10202 DPA10103-DPB10401 DPA10103-DPB10402 DPA10103-DPB10501 DPA10103-DPB110501 DPA10103-DPB112601 DPA10103-DPB11601 DPA10103-DPB11901 DPA10103-DPB12301 DPA10103-DPB13101 DPA10103-DPB13401 DPA10103-DPB13901 DPA10103-DPB14001 DPA10103-DPB14801 DPA10103-DPB14901 DPA10103-DPB15001 DPA10103-DPB15101 DPA10103-DPB15501 DPA10103-DPB18001 DPA10104-DPB10101 DPA10105-DPB10101 DPA10105-DPB10401 DPA10105-DPB15001 DPA10201-DPB10201 DPA10201-DPB10202 DPA10201-DPB10501 DPA10201-DPB110601 DPA10201-DPB11501 DPA10201-DPB11601 DPA10201-DPB11901 DPA10201-DPB13401 DPA10201-DPB15501 DPA10202-DPB10101 DPA10202-DPB10401 DPA10202-DPB10501 DPA10202-DPB110601 DPA10202-DPB11101 DPA10202-DPB11301 DPA10202-DPB11801 DPA10202-DPB11901 DPA10202-DPB13101 DPA10202-DPB13801 DPA10202-DPB15501 DPA10202-DPB16501 DPA10301-DPB10101 DPA10301-DPB110601 DPA10301-DPB16501 DPA10401-DPB10101 DPA10401-DPB10201 DPA10401-DPB10202 DPA10401-DPB10402 DPA10401-DPB10501; note = HLAs: DPA10401-DPB110501 DPA10401-DPB14901
KEPPKLWTGFELLPDKWTVQ

SEQ ID NO: 7408 - protein, 20 aa, synthetic construct
  source 1..20: note = Seed: KEPPFLWMGYELHPDKWTVQ; note = HLAs: DPA10103-DPB10101 DPA10103-DPB10201 DPA10103-DPB10202 DPA10103-DPB10401 DPA10103-DPB10402 DPA10103-DPB10501 DPA10103-DPB110501 DPA10103-DPB112601 DPA10103-DPB11501 DPA10103-DPB11601 DPA10103-DPB11801 DPA10103-DPB11901 DPA10103-DPB12301 DPA10103-DPB13101 DPA10103-DPB13401 DPA10103-DPB13901 DPA10103-DPB14001 DPA10103-DPB14101 DPA10103-DPB14801 DPA10103-DPB14901 DPA10103-DPB15001 DPA10103-DPB15101 DPA10103-DPB15501 DPA10103-DPB15901 DPA10103-DPB18001 DPA10104-DPB10101 DPA10104-DPB11501 DPA10105-DPB10101 DPA10105-DPB10401 DPA10105-DPB11801 DPA10105-DPB15001 DPA10106-DPB10101 DPA10201-DPB10101 DPA10201-DPB10201 DPA10201-DPB10202 DPA10201-DPB10401 DPA10201-DPB10501 DPA10201-DPB110601 DPA10201-DPB11501 DPA10201-DPB11601 DPA10201-DPB11901 DPA10201-DPB13401 DPA10201-DPB15501 DPA10202-DPB10101 DPA10202-DPB10201 DPA10202-DPB10202 DPA10202-DPB10401 DPA10202-DPB10501 DPA10202-DPB110601 DPA10202-DPB11301 DPA10202-DPB11801 DPA10202-DPB11901 DPA10202-DPB13101 DPA10202-DPB13801 DPA10202-DPB15501; note = HLAs: DPA10202-DPB16501 DPA10301-DPB10101 DPA10301-DPB10201 DPA10301-DPB10202 DPA10301-DPB10401 DPA10301-DPB10402 DPA10301-DPB110501 DPA10301-DPB110601 DPA10301-DPB11101 DPA10301-DPB11301 DPA10301-DPB11801 DPA10301-DPB12301 DPA10301-DPB13901 DPA10301-DPB14001 DPA10301-DPB14901 DPA10301-DPB15501 DPA10301-DPB16501 DPA10301-DPB17501 DPA10301-DPB18001 DPA10401-DPB10101 DPA10401-DPB10201 DPA10401-DPB10202 DPA10401-DPB10402 DPA10401-DPB10501 DPA10401-DPB110501 DPA10401-DPB14901
KEPPLLWQGFELSPDKWTVQ

SEQ ID NO: 7409 - protein, 20 aa, synthetic construct
  source 1..20: note = Seed: KEPPFLWMGYELHPDKWTVQ; note = HLAs: DRB1_0101 DRB1_1001 DPA10103-DPB10101 DPA10103-DPB10201 DPA10103-DPB10202 DPA10103-DPB10401 DPA10103-DPB10402 DPA10103-DPB10501 DPA10103-DPB110501 DPA10103-DPB112601 DPA10103-DPB11501 DPA10103-DPB11601 DPA10103-DPB11801 DPA10103-DPB11901 DPA10103-DPB12301 DPA10103-DPB13101 DPA10103-DPB13401 DPA10103-DPB13901 DPA10103-DPB14001 DPA10103-DPB14101 DPA10103-DPB14801 DPA10103-DPB14901 DPA10103-DPB15001 DPA10103-DPB15101 DPA10103-DPB15501 DPA10103-DPB15901 DPA10103-DPB18001 DPA10104-DPB10101 DPA10104-DPB11501 DPA10105-DPB10101 DPA10105-DPB10401 DPA10105-DPB11801 DPA10105-DPB15001 DPA10106-DPB10101 DPA10201-DPB10101 DPA10201-DPB10201 DPA10201-DPB10202 DPA10201-DPB10401 DPA10201-DPB10501 DPA10201-DPB110601 DPA10201-DPB11501 DPA10201-DPB11601 DPA10201-DPB11901 DPA10201-DPB13401 DPA10201-DPB15501 DPA10202-DPB10101 DPA10202-DPB10201 DPA10202-DPB10202 DPA10202-DPB10401 DPA10202-DPB10501 DPA10202-DPB110601 DPA10202-DPB11101 DPA10202-DPB11301 DPA10202-DPB11801 DPA10202-DPB11901; note = HLAs: DPA10202-DPB13101 DPA10202-DPB13801 DPA10202-DPB15501 DPA10202-DPB16501 DPA10301-DPB10101 DPA10301-DPB10201 DPA10301-DPB10202 DPA10301-DPB10401 DPA10301-DPB10402 DPA10301-DPB110501 DPA10301-DPB110601 DPA10301-DPB11101 DPA10301-DPB11301 DPA10301-DPB11801 DPA10301-DPB12301 DPA10301-DPB13901 DPA10301-DPB14001 DPA10301-DPB14901 DPA10301-DPB15501 DPA10301-DPB16501 DPA10301-DPB17501 DPA10301-DPB18001 DPA10401-DPB10101 DPA10401-DPB10201 DPA10401-DPB10202 DPA10401-DPB10402 DPA10401-DPB10501 DPA10401-DPB110501 DPA10401-DPB14901
KEPPYLWEGLELLPDKWTVQ

SEQ ID NO: 7410 - protein, 20 aa, synthetic construct
  source 1..20: note = Seed: KEPPFLWMGYELHPDKWTVQ; note = HLAs: DPA10103-DPB10501 DPA10103-DPB11601 DPA10103-DPB11901 DPA10103-DPB15001 DPA10103-DPB15501 DPA10105-DPB15001 DPA10201-DPB10501 DPA10201-DPB11601 DPA10201-DPB15501 DPA10202-DPB10501 DPA10202-DPB110601 DPA10202-DPB11101 DPA10202-DPB11901 DPA10202-DPB13801 DPA10202-DPB15501 DPA10301-DPB110601 DPA10301-DPB11101 DPA10301-DPB11301 DPA10301-DPB15501 DPA10401-DPB10501
KEPPRLWIGIELLPDKWTVQ

SEQ ID NO: 7411 - protein, 20 aa, synthetic construct
  source 1..20: note = Seed: KEPPFLWMGYELHPDKWTVQ; note = HLAs: DRB1_0101 DRB1_1001 DPA10103-DPB10101 DPA10103-DPB10201 DPA10103-DPB10202 DPA10103-DPB10401 DPA10103-DPB10501 DPA10103-DPB112601 DPA10103-DPB11501 DPA10103-DPB11601 DPA10103-DPB11801 DPA10103-DPB11901 DPA10103-DPB12301 DPA10103-DPB13101 DPA10103-DPB13401 DPA10103-DPB13901 DPA10103-DPB14001 DPA10103-DPB14101 DPA10103-DPB14801 DPA10103-DPB15001 DPA10103-DPB15501 DPA10103-DPB15901 DPA10104-DPB10101 DPA10104-DPB11501 DPA10105-DPB10101 DPA10105-DPB10401 DPA10105-DPB11801 DPA10105-DPB15001 DPA10106-DPB10101 DPA10201-DPB10101 DPA10201-DPB10201 DPA10201-DPB10202 DPA10201-DPB10401 DPA10201-DPB110601 DPA10201-DPB11501 DPA10201-DPB11601 DPA10201-DPB11901 DPA10201-DPB13401 DPA10201-DPB15501 DPA10202-DPB10101 DPA10202-DPB10201 DPA10202-DPB10202 DPA10202-DPB10501 DPA10202-DPB110601 DPA10202-DPB11301 DPA10202-DPB11801 DPA10202-DPB11901 DPA10202-DPB13101 DPA10202-DPB13801 DPA10202-DPB15501 DPA10202-DPB16501 DPA10301-DPB10101 DPA10301-DPB10201 DPA10301-DPB10202 DPA10301-DPB10401; note = HLAs: DPA10301-DPB10402 DPA10301-DPB110501 DPA10301-DPB110601 DPA10301-DPB11101 DPA10301-DPB11301 DPA10301-DPB11801 DPA10301-DPB12301 DPA10301-DPB13901 DPA10301-DPB14001 DPA10301-DPB14901 DPA10301-DPB15501 DPA10301-DPB16501 DPA10301-DPB17501 DPA10301-DPB18001 DPA10401-DPB10101 DPA10401-DPB10201 DPA10401-DPB10202 DPA10401-DPB10402 DPA10401-DPB10501 DPA10401-DPB110501 DPA10401-DPB14901
KEPPWLWTGIELLPDKWTVQ

SEQ ID NO: 7412 - protein, 20 aa, synthetic construct
  source 1..20: note = Seed: KEPPFLWMGYELHPDKWTVQ; note = HLAs: DPA10103-DPB10101 DPA10103-DPB10201 DPA10103-DPB10202 DPA10103-DPB10401 DPA10103-DPB10402 DPA10103-DPB10501 DPA10103-DPB110501 DPA10103-DPB112601 DPA10103-DPB11501 DPA10103-DPB11601 DPA10103-DPB11801 DPA10103-DPB11901 DPA10103-DPB12301 DPA10103-DPB13101 DPA10103-DPB13401 DPA10103-DPB13901 DPA10103-DPB14001 DPA10103-DPB14101 DPA10103-DPB14801 DPA10103-DPB14901 DPA10103-DPB15001 DPA10103-DPB15101 DPA10103-DPB15501 DPA10103-DPB15901 DPA10103-DPB18001 DPA10104-DPB10101 DPA10104-DPB11501 DPA10105-DPB10101 DPA10105-DPB10401 DPA10105-DPB11801 DPA10105-DPB15001 DPA10106-DPB10101 DPA10201-DPB10101 DPA10201-DPB10201 DPA10201-DPB10202 DPA10201-DPB10401 DPA10201-DPB10501 DPA10201-DPB110601 DPA10201-DPB11501 DPA10201-DPB11601 DPA10201-DPB11901 DPA10201-DPB13401 DPA10201-DPB15501 DPA10202-DPB10101 DPA10202-DPB10201 DPA10202-DPB10202 DPA10202-DPB10401 DPA10202-DPB10501 DPA10202-DPB110601 DPA10202-DPB11301 DPA10202-DPB11901 DPA10202-DPB13101 DPA10202-DPB13801 DPA10202-DPB15501 DPA10202-DPB16501; note = HLAs: DPA10301-DPB10101 DPA10301-DPB10201 DPA10301-DPB10202 DPA10301-DPB10401 DPA10301-DPB10402 DPA10301-DPB110501 DPA10301-DPB110601 DPA10301-DPB11301 DPA10301-DPB11801 DPA10301-DPB12301 DPA10301-DPB13901 DPA10301-DPB14001 DPA10301-DPB14901 DPA10301-DPB16501 DPA10301-DPB17501 DPA10301-DPB18001 DPA10401-DPB10101 DPA10401-DPB10201 DPA10401-DPB10202 DPA10401-DPB10402 DPA10401-DPB10501 DPA10401-DPB110501 DPA10401-DPB14901
KEPPFLWRGFELEPDKWTVQ

SEQ ID NO: 7413 - protein, 20 aa, synthetic construct
  source 1..20: note = Seed: KEPPFLWMGYELHPDKWTVQ; note = HLAs: DRB1_0101 DRB1_0405 DRB1_1001 DPA10103-DPB10101 DPA10103-DPB10201 DPA10103-DPB10202 DPA10103-DPB10401 DPA10103-DPB10402 DPA10103-DPB10501 DPA10103-DPB110501 DPA10103-DPB112601 DPA10103-DPB11501 DPA10103-DPB11601 DPA10103-DPB11801 DPA10103-DPB11901 DPA10103-DPB12301 DPA10103-DPB13101 DPA10103-DPB13401 DPA10103-DPB13901 DPA10103-DPB14001 DPA10103-DPB14101 DPA10103-DPB14801 DPA10103-DPB14901 DPA10103-DPB15001 DPA10103-DPB15101 DPA10103-DPB15501 DPA10103-DPB15901 DPA10103-DPB18001 DPA10104-DPB10101 DPA10104-DPB11501 DPA10105-DPB10101 DPA10105-DPB10401 DPA10105-DPB11801 DPA10105-DPB15001 DPA10106-DPB10101 DPA10201-DPB10101 DPA10201-DPB10201 DPA10201-DPB10202 DPA10201-DPB10401 DPA10201-DPB10501 DPA10201-DPB110601 DPA10201-DPB11501 DPA10201-DPB11601 DPA10201-DPB11901 DPA10201-DPB15501 DPA10202-DPB10101 DPA10202-DPB10201 DPA10202-DPB10202 DPA10202-DPB10501 DPA10202-DPB110601 DPA10202-DPB11101 DPA10202-DPB11301 DPA10202-DPB11801 DPA10202-DPB11901 DPA10202-DPB13101 DPA10202-DPB13801; note = HLAs: DPA10202-DPB15501 DPA10202-DPB16501 DPA10301-DPB10101 DPA10301-DPB10201 DPA10301-DPB10202 DPA10301-DPB10401 DPA10301-DPB10402 DPA10301-DPB110501 DPA10301-DPB110601 DPA10301-DPB11101 DPA10301-DPB11301 DPA10301-DPB11801 DPA10301-DPB12301 DPA10301-DPB13901 DPA10301-DPB14001 DPA10301-DPB14901 DPA10301-DPB15501 DPA10301-DPB16501 DPA10301-DPB17501 DPA10301-DPB18001 DPA10401-DPB10101 DPA10401-DPB10201 DPA10401-DPB10202 DPA10401-DPB10402 DPA10401-DPB10501 DPA10401-DPB110501 DPA10401-DPB14901
KEPPFLWIGVELMPDKWTVQ

SEQ ID NO: 7414 - protein, 20 aa, synthetic construct
  source 1..20: note = Seed: KEPPFLWMGYELHPDKWTVQ; note = HLAs: DRB1_0101 DRB1_0405 DRB1_1001 DPA10103-DPB10402 DPA10103-DPB110501 DPA10103-DPB11501 DPA10103-DPB11801 DPA10103-DPB13401 DPA10103-DPB14001 DPA10103-DPB14901 DPA10103-DPB15101 DPA10103-DPB15901 DPA10103-DPB18001 DPA10104-DPB11501 DPA10105-DPB11801 DPA10106-DPB10101 DPA10201-DPB10101 DPA10201-DPB10201 DPA10201-DPB10202 DPA10201-DPB10401 DPA10201-DPB10501 DPA10201-DPB110601 DPA10201-DPB11501 DPA10201-DPB11601 DPA10201-DPB11901 DPA10201-DPB13401 DPA10201-DPB15501 DPA10202-DPB10101 DPA10202-DPB10201 DPA10202-DPB10202 DPA10202-DPB10401 DPA10202-DPB10501 DPA10202-DPB110601 DPA10202-DPB11101 DPA10202-DPB11301 DPA10202-DPB11801 DPA10202-DPB11901 DPA10202-DPB13101 DPA10202-DPB13801 DPA10202-DPB15501 DPA10202-DPB16501 DPA10301-DPB10201 DPA10301-DPB10202 DPA10301-DPB10401 DPA10301-DPB10402 DPA10301-DPB110501 DPA10301-DPB110601 DPA10301-DPB11101 DPA10301-DPB11801 DPA10301-DPB12301 DPA10301-DPB13901 DPA10301-DPB14001 DPA10301-DPB14901 DPA10301-DPB15501 DPA10301-DPB17501 DPA10301-DPB18001; note = HLAs: DPA10401-DPB10402 DPA10401-DPB110501 DPA10401-DPB14901
KEPPFLWMGTELLPDKWTVQ

SEQ ID NO: 7415 - protein, 20 aa, synthetic construct
  source 1..20: note = Seed: KEPPFLWMGYELHPDKWTVQ; note = HLAs: DPA10103-DPB10101 DPA10103-DPB10201 DPA10103-DPB10202 DPA10103-DPB10401 DPA10103-DPB10402 DPA10103-DPB10501 DPA10103-DPB110501 DPA10103-DPB112601 DPA10103-DPB11501 DPA10103-DPB11601 DPA10103-DPB11801 DPA10103-DPB11901 DPA10103-DPB12301 DPA10103-DPB13101 DPA10103-DPB13401 DPA10103-DPB13901 DPA10103-DPB14001 DPA10103-DPB14101 DPA10103-DPB14801 DPA10103-DPB14901 DPA10103-DPB15001 DPA10103-DPB15101 DPA10103-DPB15501 DPA10103-DPB15901 DPA10103-DPB18001 DPA10104-DPB10101 DPA10104-DPB11501 DPA10105-DPB10101 DPA10105-DPB10401 DPA10105-DPB11801 DPA10105-DPB15001 DPA10106-DPB10101 DPA10201-DPB10101 DPA10201-DPB10201 DPA10201-DPB10202 DPA10201-DPB10401 DPA10201-DPB10501 DPA10201-DPB110601 DPA10201-DPB11501 DPA10201-DPB11601 DPA10201-DPB11901 DPA10202-DPB10101 DPA10202-DPB10201 DPA10202-DPB10202 DPA10202-DPB10401 DPA10202-DPB10501 DPA10202-DPB110601 DPA10202-DPB11801 DPA10202-DPB11901 DPA10202-DPB13101 DPA10202-DPB13801 DPA10202-DPB15501 DPA10202-DPB16501 DPA10301-DPB10101 DPA10301-DPB10201; note = HLAs: DPA10301-DPB10202 DPA10301-DPB10401 DPA10301-DPB10402 DPA10301-DPB110501 DPA10301-DPB110601 DPA10301-DPB11101 DPA10301-DPB11301 DPA10301-DPB11801 DPA10301-DPB12301 DPA10301-DPB13901 DPA10301-DPB14001 DPA10301-DPB14901 DPA10301-DPB15501 DPA10301-DPB16501 DPA10301-DPB17501 DPA10301-DPB18001 DPA10401-DPB10101 DPA10401-DPB10201 DPA10401-DPB10202 DPA10401-DPB10402 DPA10401-DPB10501 DPA10401-DPB110501 DPA10401-DPB14901
KEPPFLWEGFELCPDKWTVQ

SEQ ID NO: 7416 - protein, 20 aa, synthetic construct
  source 1..20: note = Seed: KEPPFLWMGYELHPDKWTVQ; note = HLAs: DRB1_0101 DPA10103-DPB10101 DPA10103-DPB10201 DPA10103-DPB10202 DPA10103-DPB10401 DPA10103-DPB10402 DPA10103-DPB10501 DPA10103-DPB110501 DPA10103-DPB112601 DPA10103-DPB11501 DPA10103-DPB11601 DPA10103-DPB11801 DPA10103-DPB11901 DPA10103-DPB12301 DPA10103-DPB13101 DPA10103-DPB13401 DPA10103-DPB13901 DPA10103-DPB14001 DPA10103-DPB14101 DPA10103-DPB14801 DPA10103-DPB14901 DPA10103-DPB15001 DPA10103-DPB15101 DPA10103-DPB15501 DPA10103-DPB15901 DPA10103-DPB18001 DPA10104-DPB10101 DPA10104-DPB11501 DPA10105-DPB10101 DPA10105-DPB10401 DPA10105-DPB11801 DPA10105-DPB15001 DPA10106-DPB10101 DPA10201-DPB10101 DPA10201-DPB10201 DPA10201-DPB10202 DPA10201-DPB10401 DPA10201-DPB10501 DPA10201-DPB110601 DPA10201-DPB11501 DPA10201-DPB11601 DPA10201-DPB11901 DPA10201-DPB13401 DPA10201-DPB15501 DPA10202-DPB10101 DPA10202-DPB10201 DPA10202-DPB10202 DPA10202-DPB10401 DPA10202-DPB10501 DPA10202-DPB110601 DPA10202-DPB11101 DPA10202-DPB11301 DPA10202-DPB11801 DPA10202-DPB11901 DPA10202-DPB13101; note = HLAs: DPA10202-DPB13801 DPA10202-DPB15501 DPA10202-DPB16501 DPA10301-DPB10101 DPA10301-DPB10201 DPA10301-DPB10202 DPA10301-DPB10401 DPA10301-DPB10402 DPA10301-DPB110501 DPA10301-DPB110601 DPA10301-DPB11101 DPA10301-DPB11301 DPA10301-DPB11801 DPA10301-DPB12301 DPA10301-DPB13901 DPA10301-DPB14001 DPA10301-DPB14901 DPA10301-DPB15501 DPA10301-DPB16501 DPA10301-DPB17501 DPA10301-DPB18001 DPA10401-DPB10101 DPA10401-DPB10201 DPA10401-DPB10202 DPA10401-DPB10402 DPA10401-DPB10501 DPA10401-DPB110501 DPA10401-DPB14901
KEPPYLWFGFELNPDKWTVQ

SEQ ID NO: 7417 - protein, 20 aa, synthetic construct
  source 1..20: note = Seed: KEPPFLWMGYELHPDKWTVQ; note = HLAs: DPA10103-DPB10101 DPA10103-DPB10201 DPA10103-DPB10202 DPA10103-DPB10401 DPA10103-DPB10402 DPA10103-DPB10501 DPA10103-DPB110501 DPA10103-DPB112601 DPA10103-DPB11501 DPA10103-DPB11601 DPA10103-DPB11801 DPA10103-DPB11901 DPA10103-DPB12301 DPA10103-DPB13101 DPA10103-DPB13401 DPA10103-DPB13901 DPA10103-DPB14001 DPA10103-DPB14101 DPA10103-DPB14801 DPA10103-DPB14901 DPA10103-DPB15001 DPA10103-DPB15101 DPA10103-DPB15501 DPA10103-DPB15901 DPA10103-DPB18001 DPA10104-DPB10101 DPA10104-DPB11501 DPA10105-DPB10101 DPA10105-DPB10401 DPA10105-DPB11801 DPA10105-DPB15001 DPA10106-DPB10101 DPA10201-DPB10101 DPA10201-DPB10201 DPA10201-DPB10202 DPA10201-DPB10501 DPA10201-DPB110601 DPA10201-DPB11501 DPA10201-DPB11601 DPA10201-DPB11901 DPA10201-DPB13401 DPA10201-DPB15501 DPA10202-DPB10101 DPA10202-DPB10201 DPA10202-DPB10202 DPA10202-DPB10401 DPA10202-DPB10501 DPA10202-DPB110601 DPA10202-DPB11101 DPA10202-DPB11301 DPA10202-DPB11801 DPA10202-DPB11901 DPA10202-DPB13101 DPA10202-DPB13801 DPA10202-DPB15501; note = HLAs: DPA10202-DPB16501 DPA10301-DPB10101 DPA10301-DPB10201 DPA10301-DPB10202 DPA10301-DPB10401 DPA10301-DPB10402 DPA10301-DPB110501 DPA10301-DPB110601 DPA10301-DPB11101 DPA10301-DPB11301 DPA10301-DPB11801 DPA10301-DPB12301 DPA10301-DPB13901 DPA10301-DPB14001 DPA10301-DPB14901 DPA10301-DPB15501 DPA10301-DPB16501 DPA10301-DPB17501 DPA10301-DPB18001 DPA10401-DPB10101 DPA10401-DPB10201 DPA10401-DPB10202 DPA10401-DPB10402 DPA10401-DPB10501 DPA10401-DPB110501 DPA10401-DPB14901
KEPPFLWHGLELSPDKWTVQ

SEQ ID NO: 7418 - protein, 20 aa, synthetic construct
  source 1..20: note = Seed: KEPPFLWMGYELHPDKWTVQ; note = HLAs: DPA10103-DPB10101 DPA10103-DPB10201 DPA10103-DPB10202 DPA10103-DPB10401 DPA10103-DPB10402 DPA10103-DPB10501 DPA10103-DPB110501 DPA10103-DPB112601 DPA10103-DPB11601 DPA10103-DPB11901 DPA10103-DPB12301 DPA10103-DPB13101 DPA10103-DPB13401 DPA10103-DPB13901 DPA10103-DPB14001 DPA10103-DPB14101 DPA10103-DPB14801 DPA10103-DPB14901 DPA10103-DPB15001 DPA10103-DPB15101 DPA10103-DPB15501 DPA10103-DPB15901 DPA10103-DPB18001 DPA10104-DPB10101 DPA10105-DPB10101 DPA10105-DPB10401 DPA10105-DPB15001 DPA10201-DPB10201 DPA10201-DPB10202 DPA10201-DPB10401 DPA10201-DPB10501 DPA10201-DPB110601 DPA10201-DPB11501 DPA10201-DPB11601 DPA10201-DPB11901 DPA10201-DPB13401 DPA10201-DPB15501 DPA10202-DPB10201 DPA10202-DPB10202 DPA10202-DPB10401 DPA10202-DPB10501 DPA10202-DPB110601 DPA10202-DPB11101 DPA10202-DPB11301 DPA10202-DPB11801 DPA10202-DPB11901 DPA10202-DPB13101 DPA10202-DPB13801 DPA10202-DPB15501 DPA10301-DPB110601 DPA10301-DPB11101 DPA10301-DPB16501 DPA10301-DPB17501 DPA10401-DPB10101; note = HLAs: DPA10401-DPB10201 DPA10401-DPB10202 DPA10401-DPB10402 DPA10401-DPB10501 DPA10401-DPB110501 DPA10401-DPB14901
KEPPRLWLGFELLPDKWTVQ

SEQ ID NO: 7419 - protein, 20 aa, synthetic construct
  source 1..20: note = Seed: KEPPFLWMGYELHPDKWTVQ; note = HLAs: DPA10103-DPB10101 DPA10103-DPB10201 DPA10103-DPB10202 DPA10103-DPB10401 DPA10103-DPB10402 DPA10103-DPB10501 DPA10103-DPB110501 DPA10103-DPB112601 DPA10103-DPB11501 DPA10103-DPB11601 DPA10103-DPB11801 DPA10103-DPB11901 DPA10103-DPB12301 DPA10103-DPB13101 DPA10103-DPB13401 DPA10103-DPB13901 DPA10103-DPB14001 DPA10103-DPB14101 DPA10103-DPB14801 DPA10103-DPB14901 DPA10103-DPB15001 DPA10103-DPB15101 DPA10103-DPB15501 DPA10103-DPB15901 DPA10103-DPB18001 DPA10104-DPB10101 DPA10104-DPB11501 DPA10105-DPB10101 DPA10105-DPB10401 DPA10105-DPB11801 DPA10105-DPB15001 DPA10106-DPB10101 DPA10201-DPB10101 DPA10201-DPB10201 DPA10201-DPB10202 DPA10201-DPB10401 DPA10201-DPB10501 DPA10201-DPB110601 DPA10201-DPB11501 DPA10201-DPB11601 DPA10201-DPB11901 DPA10201-DPB13401 DPA10201-DPB15501 DPA10202-DPB10101 DPA10202-DPB10201 DPA10202-DPB10202 DPA10202-DPB10401 DPA10202-DPB10501 DPA10202-DPB110601 DPA10202-DPB11101 DPA10202-DPB11301 DPA10202-DPB11901 DPA10202-DPB13101 DPA10202-DPB13801 DPA10202-DPB15501; note = HLAs: DPA10202-DPB16501 DPA10301-DPB10101 DPA10301-DPB10201 DPA10301-DPB10202 DPA10301-DPB10401 DPA10301-DPB10402 DPA10301-DPB110501 DPA10301-DPB110601 DPA10301-DPB11101 DPA10301-DPB11301 DPA10301-DPB11801 DPA10301-DPB12301 DPA10301-DPB13901 DPA10301-DPB14001 DPA10301-DPB14901 DPA10301-DPB15501 DPA10301-DPB16501 DPA10301-DPB17501 DPA10301-DPB18001 DPA10401-DPB10101 DPA10401-DPB10201 DPA10401-DPB10202 DPA10401-DPB10402 DPA10401-DPB10501 DPA10401-DPB110501 DPA10401-DPB14901
KEPPWLWTGFELQPDKWTVQ

SEQ ID NO: 7420 - protein, 20 aa, synthetic construct
  source 1..20: note = Seed: KEPPFLWMGYELHPDKWTVQ; note = HLAs: DRB1_0101 DPA10103-DPB10101 DPA10103-DPB10201 DPA10103-DPB10202 DPA10103-DPB10401 DPA10103-DPB10402 DPA10103-DPB10501 DPA10103-DPB110501 DPA10103-DPB112601 DPA10103-DPB11501 DPA10103-DPB11601 DPA10103-DPB11801 DPA10103-DPB11901 DPA10103-DPB12301 DPA10103-DPB13101 DPA10103-DPB13401 DPA10103-DPB13901 DPA10103-DPB14001 DPA10103-DPB14101 DPA10103-DPB14801 DPA10103-DPB14901 DPA10103-DPB15001 DPA10103-DPB15101 DPA10103-DPB15501 DPA10103-DPB15901 DPA10103-DPB18001 DPA10104-DPB10101 DPA10104-DPB11501 DPA10105-DPB10101 DPA10105-DPB10401 DPA10105-DPB11801 DPA10105-DPB15001 DPA10106-DPB10101 DPA10201-DPB10101 DPA10201-DPB10201 DPA10201-DPB10202 DPA10201-DPB10401 DPA10201-DPB10501 DPA10201-DPB110601 DPA10201-DPB11501 DPA10201-DPB11601 DPA10201-DPB11901 DPA10201-DPB13401 DPA10201-DPB15501 DPA10202-DPB10101 DPA10202-DPB10201 DPA10202-DPB10202 DPA10202-DPB10401 DPA10202-DPB10501 DPA10202-DPB110601 DPA10202-DPB11101 DPA10202-DPB11301 DPA10202-DPB11801 DPA10202-DPB11901 DPA10202-DPB13101; note = HLAs: DPA10202-DPB13801 DPA10202-DPB15501 DPA10202-DPB16501 DPA10301-DPB10101 DPA10301-DPB10201 DPA10301-DPB10202 DPA10301-DPB10401 DPA10301-DPB10402 DPA10301-DPB110501 DPA10301-DPB110601 DPA10301-DPB11101 DPA10301-DPB11301 DPA10301-DPB11801 DPA10301-DPB12301 DPA10301-DPB13901 DPA10301-DPB14001 DPA10301-DPB14901 DPA10301-DPB15501 DPA10301-DPB16501 DPA10301-DPB17501 DPA10301-DPB18001 DPA10401-DPB10101 DPA10401-DPB10201 DPA10401-DPB10202 DPA10401-DPB10402 DPA10401-DPB10501 DPA10401-DPB110501 DPA10401-DPB14901
KEPPWLWTGLELIPDKWTVQ

SEQ ID NO: 7421 - protein, 20 aa, synthetic construct
  source 1..20: note = Seed: KEPPFLWMGYELHPDKWTVQ; note = HLAs: DPA10103-DPB10101 DPA10103-DPB10201 DPA10103-DPB10202 DPA10103-DPB10401 DPA10103-DPB10402 DPA10103-DPB10501 DPA10103-DPB110501 DPA10103-DPB112601 DPA10103-DPB11501 DPA10103-DPB11601 DPA10103-DPB11801 DPA10103-DPB11901 DPA10103-DPB12301 DPA10103-DPB13101 DPA10103-DPB13401 DPA10103-DPB13901 DPA10103-DPB14001 DPA10103-DPB14101 DPA10103-DPB14801 DPA10103-DPB14901 DPA10103-DPB15001 DPA10103-DPB15101 DPA10103-DPB15501 DPA10103-DPB15901 DPA10103-DPB18001 DPA10104-DPB10101 DPA10104-DPB11501 DPA10105-DPB10101 DPA10105-DPB10401 DPA10105-DPB11801 DPA10105-DPB15001 DPA10106-DPB10101 DPA10201-DPB10101 DPA10201-DPB10201 DPA10201-DPB10202 DPA10201-DPB10401 DPA10201-DPB10501 DPA10201-DPB110601 DPA10201-DPB11501 DPA10201-DPB11601 DPA10201-DPB11901 DPA10201-DPB13401 DPA10201-DPB15501 DPA10202-DPB10101 DPA10202-DPB10201 DPA10202-DPB10202 DPA10202-DPB10401 DPA10202-DPB10501 DPA10202-DPB110601 DPA10202-DPB11101 DPA10202-DPB11301 DPA10202-DPB11901 DPA10202-DPB13101 DPA10202-DPB13801 DPA10202-DPB15501; note = HLAs: DPA10202-DPB16501 DPA10301-DPB10101 DPA10301-DPB10201 DPA10301-DPB10202 DPA10301-DPB10401 DPA10301-DPB10402 DPA10301-DPB110501 DPA10301-DPB110601 DPA10301-DPB11101 DPA10301-DPB11301 DPA10301-DPB11801 DPA10301-DPB12301 DPA10301-DPB13901 DPA10301-DPB14001 DPA10301-DPB14901 DPA10301-DPB15501 DPA10301-DPB16501 DPA10301-DPB17501 DPA10301-DPB18001 DPA10401-DPB10101 DPA10401-DPB10201 DPA10401-DPB10202 DPA10401-DPB10402 DPA10401-DPB10501 DPA10401-DPB110501 DPA10401-DPB14901
KEPPFLWTGWELEPDKWTVQ

SEQ ID NO: 7422 - protein, 20 aa, synthetic construct
  source 1..20: note = Seed: KEPPFLWMGYELHPDKWTVQ; note = HLAs: DPA10103-DPB10201 DPA10103-DPB10202 DPA10103-DPB10401 DPA10103-DPB10501 DPA10103-DPB112601 DPA10103-DPB11501 DPA10103-DPB11601 DPA10103-DPB11801 DPA10103-DPB11901 DPA10103-DPB12301 DPA10103-DPB13101 DPA10103-DPB13401 DPA10103-DPB13901 DPA10103-DPB14001 DPA10103-DPB14101 DPA10103-DPB14801 DPA10103-DPB15501 DPA10103-DPB15901 DPA10104-DPB11501 DPA10105-DPB10401 DPA10105-DPB11801 DPA10106-DPB10101 DPA10201-DPB10101 DPA10201-DPB10201 DPA10201-DPB10202 DPA10201-DPB10401 DPA10201-DPB10501 DPA10201-DPB110601 DPA10201-DPB11501 DPA10201-DPB11601 DPA10201-DPB11901 DPA10201-DPB13401 DPA10201-DPB15501 DPA10202-DPB10201 DPA10202-DPB10202 DPA10202-DPB10401 DPA10202-DPB10501 DPA10202-DPB110601 DPA10202-DPB11301 DPA10202-DPB11801 DPA10202-DPB11901 DPA10202-DPB13101 DPA10202-DPB13801 DPA10202-DPB15501 DPA10301-DPB10201 DPA10301-DPB10202 DPA10301-DPB10402 DPA10301-DPB110501 DPA10301-DPB110601 DPA10301-DPB11801 DPA10301-DPB14901 DPA10301-DPB17501 DPA10301-DPB18001 DPA10401-DPB10201; note = HLAs: DPA10401-DPB10202 DPA10401-DPB10402 DPA10401-DPB10501 DPA10401-DPB110501 DPA10401-DPB14901
KEPPFLWRGLELLPDKWTVQ

SEQ ID NO: 7423 - protein, 14 aa, synthetic construct
  source 1..14: note = Seed: PPFLWMGYELHPDK; note = HLAs: DRB1_1001 DPA10103-DPB10101 DPA10103-DPB10201 DPA10103-DPB10202 DPA10103-DPB10401 DPA10103-DPB112601 DPA10103-DPB11501 DPA10103-DPB11601 DPA10103-DPB11901 DPA10103-DPB12301 DPA10103-DPB13101 DPA10103-DPB13401 DPA10103-DPB13901 DPA10103-DPB14001 DPA10103-DPB14101 DPA10103-DPB14801 DPA10103-DPB15001 DPA10103-DPB15901 DPA10104-DPB10101 DPA10104-DPB11501 DPA10105-DPB10101 DPA10105-DPB10401 DPA10105-DPB15001 DPA10106-DPB10101 DPA10201-DPB10101 DPA10201-DPB110601 DPA10201-DPB11501 DPA10201-DPB11601 DPA10201-DPB11901 DPA10202-DPB10101 DPA10202-DPB10201 DPA10202-DPB10202 DPA10202-DPB10401 DPA10202-DPB110601 DPA10202-DPB11901 DPA10202-DPB13101 DPA10202-DPB16501 DPA10301-DPB10101 DPA10301-DPB10201 DPA10301-DPB10202 DPA10301-DPB10401 DPA10301-DPB10402 DPA10301-DPB110501 DPA10301-DPB110601 DPA10301-DPB11801 DPA10301-DPB12301 DPA10301-DPB13901 DPA10301-DPB14001 DPA10301-DPB14901 DPA10301-DPB15501 DPA10301-DPB16501 DPA10301-DPB17501 DPA10301-DPB18001 DPA10401-DPB10101 DPA10401-DPB10201; note = HLAs: DPA10401-DPB10202 DPA10401-DPB10402 DPA10401-DPB10501 DPA10401-DPB110501 DPA10401-DPB14901
PPFLWLGVELVPDK

SEQ ID NO: 7424 - protein, 20 aa, synthetic construct
  source 1..20: note = Seed: KEPPFLWMGYELHPDKWTVQ; note = HLAs: DRB1_0101 DRB1_0405 DRB1_1001 DPA10103-DPB10201 DPA10103-DPB10202 DPA10103-DPB10401 DPA10103-DPB10402 DPA10103-DPB10501 DPA10103-DPB110501 DPA10103-DPB112601 DPA10103-DPB11501 DPA10103-DPB11801 DPA10103-DPB12301 DPA10103-DPB13401 DPA10103-DPB13901 DPA10103-DPB14001 DPA10103-DPB14101 DPA10103-DPB14801 DPA10103-DPB14901 DPA10103-DPB15001 DPA10103-DPB15101 DPA10103-DPB15501 DPA10103-DPB15901 DPA10103-DPB18001 DPA10104-DPB11501 DPA10105-DPB10401 DPA10105-DPB11801 DPA10105-DPB15001 DPA10106-DPB10101 DPA10201-DPB10101 DPA10201-DPB10201 DPA10201-DPB10202 DPA10201-DPB10401 DPA10201-DPB10501 DPA10201-DPB110601 DPA10201-DPB11501 DPA10201-DPB11601 DPA10201-DPB11901 DPA10201-DPB13401 DPA10201-DPB15501 DPA10202-DPB10101 DPA10202-DPB10201 DPA10202-DPB10202 DPA10202-DPB10501 DPA10202-DPB110601 DPA10202-DPB11101 DPA10202-DPB11301 DPA10202-DPB11801 DPA10202-DPB11901 DPA10202-DPB13101 DPA10202-DPB13801 DPA10202-DPB15501 DPA10202-DPB16501 DPA10301-DPB10201 DPA10301-DPB10202 DPA10301-DPB10401; note = HLAs: DPA10301-DPB10402 DPA10301-DPB110501 DPA10301-DPB110601 DPA10301-DPB11101 DPA10301-DPB11301 DPA10301-DPB11801 DPA10301-DPB12301 DPA10301-DPB13901 DPA10301-DPB14001 DPA10301-DPB14901 DPA10301-DPB15501 DPA10301-DPB16501 DPA10301-DPB17501 DPA10301-DPB18001 DPA10401-DPB10201 DPA10401-DPB10202 DPA10401-DPB10402 DPA10401-DPB10501 DPA10401-DPB110501 DPA10401-DPB14901
KEPPYLWMGIELLPDKWTVQ

SEQ ID NO: 7425 - protein, 20 aa, synthetic construct
  source 1..20: note = Seed: KEPPFLWMGYELHPDKWTVQ; note = HLAs: DRB1_0101 DRB1_0405 DRB1_1001 DPA10103-DPB10101 DPA10103-DPB10201 DPA10103-DPB10202 DPA10103-DPB10401 DPA10103-DPB10501 DPA10103-DPB112601 DPA10103-DPB11501 DPA10103-DPB11601 DPA10103-DPB11801 DPA10103-DPB11901 DPA10103-DPB12301 DPA10103-DPB13101 DPA10103-DPB13401 DPA10103-DPB13901 DPA10103-DPB14001 DPA10103-DPB14101 DPA10103-DPB14801 DPA10103-DPB15001 DPA10103-DPB15501 DPA10103-DPB15901 DPA10104-DPB10101 DPA10104-DPB11501 DPA10105-DPB10101 DPA10105-DPB10401 DPA10105-DPB11801 DPA10105-DPB15001 DPA10106-DPB10101 DPA10201-DPB10101 DPA10201-DPB10201 DPA10201-DPB10202 DPA10201-DPB10401 DPA10201-DPB10501 DPA10201-DPB110601 DPA10201-DPB11501 DPA10201-DPB11601 DPA10201-DPB11901 DPA10201-DPB13401 DPA10201-DPB15501 DPA10202-DPB10101 DPA10202-DPB10201 DPA10202-DPB10202 DPA10202-DPB10401 DPA10202-DPB10501 DPA10202-DPB110601 DPA10202-DPB11301 DPA10202-DPB11901 DPA10202-DPB13101 DPA10202-DPB13801 DPA10202-DPB15501 DPA10202-DPB16501 DPA10301-DPB10101 DPA10301-DPB10201 DPA10301-DPB10202; note = HLAs: DPA10301-DPB10401 DPA10301-DPB10402 DPA10301-DPB110501 DPA10301-DPB110601 DPA10301-DPB11101 DPA10301-DPB11301 DPA10301-DPB11801 DPA10301-DPB12301 DPA10301-DPB13901 DPA10301-DPB14001 DPA10301-DPB14901 DPA10301-DPB15501 DPA10301-DPB16501 DPA10301-DPB17501 DPA10301-DPB18001 DPA10401-DPB10101 DPA10401-DPB10201 DPA10401-DPB10202 DPA10401-DPB10402 DPA10401-DPB10501 DPA10401-DPB110501 DPA10401-DPB14901
KEPPYLWTGVELLPDKWTVQ

SEQ ID NO: 7426 - protein, 20 aa, synthetic construct
  source 1..20: note = Seed: KEPPFLWMGYELHPDKWTVQ; note = HLAs: DRB1_0101 DPA10103-DPB10101 DPA10103-DPB10201 DPA10103-DPB10202 DPA10103-DPB10401 DPA10103-DPB10501 DPA10103-DPB112601 DPA10103-DPB11501 DPA10103-DPB11601 DPA10103-DPB11801 DPA10103-DPB11901 DPA10103-DPB12301 DPA10103-DPB13101 DPA10103-DPB13401 DPA10103-DPB13901 DPA10103-DPB14001 DPA10103-DPB14101 DPA10103-DPB14801 DPA10103-DPB15001 DPA10103-DPB15501 DPA10103-DPB15901 DPA10104-DPB10101 DPA10104-DPB11501 DPA10105-DPB10101 DPA10105-DPB10401 DPA10105-DPB11801 DPA10105-DPB15001 DPA10106-DPB10101 DPA10201-DPB10101 DPA10201-DPB10201 DPA10201-DPB10202 DPA10201-DPB10401 DPA10201-DPB10501 DPA10201-DPB110601 DPA10201-DPB11501 DPA10201-DPB11601 DPA10201-DPB11901 DPA10201-DPB13401 DPA10201-DPB15501 DPA10202-DPB10101 DPA10202-DPB10201 DPA10202-DPB10202 DPA10202-DPB10401 DPA10202-DPB10501 DPA10202-DPB110601 DPA10202-DPB11301 DPA10202-DPB11801 DPA10202-DPB11901 DPA10202-DPB13101 DPA10202-DPB13801 DPA10202-DPB15501 DPA10202-DPB16501 DPA10301-DPB10101 DPA10301-DPB10201 DPA10301-DPB10202; note = HLAs: DPA10301-DPB10401 DPA10301-DPB10402 DPA10301-DPB110501 DPA10301-DPB110601 DPA10301-DPB11301 DPA10301-DPB11801 DPA10301-DPB12301 DPA10301-DPB13901 DPA10301-DPB14001 DPA10301-DPB14901 DPA10301-DPB15501 DPA10301-DPB16501 DPA10301-DPB17501 DPA10301-DPB18001 DPA10401-DPB10101 DPA10401-DPB10201 DPA10401-DPB10202 DPA10401-DPB10402 DPA10401-DPB10501 DPA10401-DPB110501 DPA10401-DPB14901
KEPPYLWHGMELLPDKWTVQ

SEQ ID NO: 7427 - protein, 14 aa, synthetic construct
  source 1..14: note = Seed: PPFLWMGYELHPDK; note = HLAs: DPA10103-DPB10202 DPA10103-DPB10401 DPA10103-DPB112601 DPA10103-DPB11501 DPA10103-DPB12301 DPA10103-DPB13401 DPA10103-DPB13901 DPA10103-DPB14001 DPA10104-DPB11501 DPA10105-DPB10401 DPA10106-DPB10101 DPA10201-DPB10101 DPA10201-DPB110601 DPA10201-DPB11501 DPA10201-DPB11601 DPA10201-DPB11901 DPA10202-DPB10201 DPA10202-DPB10202 DPA10202-DPB10401 DPA10202-DPB110601 DPA10202-DPB11901 DPA10202-DPB16501 DPA10301-DPB10201 DPA10301-DPB10202 DPA10301-DPB10401 DPA10301-DPB10402 DPA10301-DPB110501 DPA10301-DPB110601 DPA10301-DPB11801 DPA10301-DPB12301 DPA10301-DPB13901 DPA10301-DPB14001 DPA10301-DPB14901 DPA10301-DPB16501 DPA10301-DPB17501 DPA10301-DPB18001
PPMLWLGLELLPDK

SEQ ID NO: 7428 - protein, 20 aa, synthetic construct
  source 1..20: note = Seed: KEPPFLWMGYELHPDKWTVQ; note = HLAs: DPA10103-DPB10101 DPA10103-DPB10201 DPA10103-DPB10202 DPA10103-DPB10501 DPA10103-DPB11601 DPA10103-DPB11901 DPA10103-DPB13101 DPA10103-DPB13401 DPA10103-DPB14001 DPA10103-DPB14101 DPA10103-DPB14801 DPA10103-DPB15001 DPA10103-DPB15501 DPA10104-DPB10101 DPA10105-DPB10101 DPA10105-DPB15001 DPA10201-DPB10201 DPA10201-DPB10202 DPA10201-DPB10401 DPA10201-DPB10501 DPA10201-DPB110601 DPA10201-DPB11501 DPA10201-DPB11601 DPA10201-DPB11901 DPA10201-DPB13401 DPA10201-DPB15501 DPA10202-DPB10101 DPA10202-DPB10201 DPA10202-DPB10202 DPA10202-DPB10401 DPA10202-DPB10501 DPA10202-DPB110601 DPA10202-DPB11101 DPA10202-DPB11301 DPA10202-DPB11801 DPA10202-DPB11901 DPA10202-DPB13101 DPA10202-DPB13801 DPA10202-DPB15501 DPA10202-DPB16501 DPA10301-DPB10101 DPA10301-DPB110601 DPA10301-DPB11101 DPA10301-DPB11301 DPA10301-DPB15501 DPA10301-DPB16501 DPA10401-DPB10101 DPA10401-DPB10201 DPA10401-DPB10202 DPA10401-DPB10402 DPA10401-DPB10501 DPA10401-DPB110501 DPA10401-DPB14901
KEPPRLWVGFELMPDKWTVQ

SEQ ID NO: 7429 - protein, 20 aa, synthetic construct
  source 1..20: note = Seed: KEPPFLWMGYELHPDKWTVQ; note = HLAs: DPA10103-DPB10101 DPA10103-DPB10201 DPA10103-DPB10202 DPA10103-DPB10401 DPA10103-DPB10402 DPA10103-DPB10501 DPA10103-DPB110501 DPA10103-DPB112601 DPA10103-DPB11501 DPA10103-DPB11601 DPA10103-DPB11801 DPA10103-DPB11901 DPA10103-DPB12301 DPA10103-DPB13101 DPA10103-DPB13401 DPA10103-DPB13901 DPA10103-DPB14001 DPA10103-DPB14101 DPA10103-DPB14801 DPA10103-DPB14901 DPA10103-DPB15001 DPA10103-DPB15101 DPA10103-DPB15501 DPA10103-DPB15901 DPA10103-DPB18001 DPA10104-DPB10101 DPA10104-DPB11501 DPA10105-DPB10101 DPA10105-DPB10401 DPA10105-DPB11801 DPA10105-DPB15001 DPA10106-DPB10101 DPA10201-DPB10101 DPA10201-DPB10201 DPA10201-DPB10202 DPA10201-DPB10401 DPA10201-DPB10501 DPA10201-DPB110601 DPA10201-DPB11501 DPA10201-DPB11601 DPA10201-DPB11901 DPA10201-DPB13401 DPA10201-DPB15501 DPA10202-DPB10101 DPA10202-DPB10201 DPA10202-DPB10202 DPA10202-DPB10401 DPA10202-DPB10501 DPA10202-DPB110601 DPA10202-DPB11301 DPA10202-DPB11801 DPA10202-DPB11901 DPA10202-DPB13101 DPA10202-DPB13801 DPA10202-DPB15501; note = HLAs: DPA10202-DPB16501 DPA10301-DPB10101 DPA10301-DPB10201 DPA10301-DPB10202 DPA10301-DPB10401 DPA10301-DPB10402 DPA10301-DPB110501 DPA10301-DPB110601 DPA10301-DPB11101 DPA10301-DPB11301 DPA10301-DPB11801 DPA10301-DPB12301 DPA10301-DPB13901 DPA10301-DPB14001 DPA10301-DPB14901 DPA10301-DPB15501 DPA10301-DPB16501 DPA10301-DPB17501 DPA10301-DPB18001 DPA10401-DPB10101 DPA10401-DPB10201 DPA10401-DPB10202 DPA10401-DPB10402 DPA10401-DPB10501 DPA10401-DPB110501 DPA10401-DPB14901
KEPPILWQGFELTPDKWTVQ

SEQ ID NO: 7430 - protein, 20 aa, synthetic construct
  source 1..20: note = Seed: KEPPFLWMGYELHPDKWTVQ; note = HLAs: DPA10103-DPB10201 DPA10103-DPB10202 DPA10103-DPB10402 DPA10103-DPB10501 DPA10103-DPB110501 DPA10103-DPB11601 DPA10103-DPB11901 DPA10103-DPB13101 DPA10103-DPB13401 DPA10103-DPB14001 DPA10103-DPB14101 DPA10103-DPB14801 DPA10103-DPB14901 DPA10103-DPB15101 DPA10103-DPB15501 DPA10103-DPB15901 DPA10103-DPB18001 DPA10201-DPB10201 DPA10201-DPB10202 DPA10201-DPB10401 DPA10201-DPB10501 DPA10201-DPB110601 DPA10201-DPB11501 DPA10201-DPB11601 DPA10201-DPB11901 DPA10201-DPB13401 DPA10201-DPB15501 DPA10202-DPB10201 DPA10202-DPB10202 DPA10202-DPB10401 DPA10202-DPB10501 DPA10202-DPB110601 DPA10202-DPB11101 DPA10202-DPB11301 DPA10202-DPB11801 DPA10202-DPB11901 DPA10202-DPB13101 DPA10202-DPB13801 DPA10202-DPB15501 DPA10301-DPB10201 DPA10301-DPB110601 DPA10301-DPB11301 DPA10301-DPB16501 DPA10401-DPB10201 DPA10401-DPB10202 DPA10401-DPB10402 DPA10401-DPB10501 DPA10401-DPB110501 DPA10401-DPB14901
KEPPRLWFGFELLPDKWTVQ

SEQ ID NO: 7431 - protein, 20 aa, synthetic construct
  source 1..20: note = Seed: KEPPFLWMGYELHPDKWTVQ; note = HLAs: DRB1_0101 DRB1_0405 DRB1_1001 DPA10103-DPB10101 DPA10103-DPB10201 DPA10103-DPB10202 DPA10103-DPB10401 DPA10103-DPB10402 DPA10103-DPB10501 DPA10103-DPB110501 DPA10103-DPB112601 DPA10103-DPB11501 DPA10103-DPB11601 DPA10103-DPB11801 DPA10103-DPB11901 DPA10103-DPB12301 DPA10103-DPB13101 DPA10103-DPB13401 DPA10103-DPB13901 DPA10103-DPB14001 DPA10103-DPB14101 DPA10103-DPB14801 DPA10103-DPB14901 DPA10103-DPB15001 DPA10103-DPB15101 DPA10103-DPB15501 DPA10103-DPB15901 DPA10103-DPB18001 DPA10104-DPB10101 DPA10104-DPB11501 DPA10105-DPB10101 DPA10105-DPB10401 DPA10105-DPB11801 DPA10105-DPB15001 DPA10106-DPB10101 DPA10201-DPB10101 DPA10201-DPB10201 DPA10201-DPB10202 DPA10201-DPB10501 DPA10201-DPB110601 DPA10201-DPB11501 DPA10201-DPB11601 DPA10201-DPB11901 DPA10201-DPB15501 DPA10202-DPB10101 DPA10202-DPB10201 DPA10202-DPB10202 DPA10202-DPB10501 DPA10202-DPB110601 DPA10202-DPB11801 DPA10202-DPB11901 DPA10202-DPB13801 DPA10202-DPB15501 DPA10202-DPB16501 DPA10301-DPB10101 DPA10301-DPB10201; note = HLAs: DPA10301-DPB10202 DPA10301-DPB10401 DPA10301-DPB10402 DPA10301-DPB110501 DPA10301-DPB110601 DPA10301-DPB11101 DPA10301-DPB11301 DPA10301-DPB11801 DPA10301-DPB12301 DPA10301-DPB13901 DPA10301-DPB14001 DPA10301-DPB14901 DPA10301-DPB15501 DPA10301-DPB16501 DPA10301-DPB17501 DPA10301-DPB18001 DPA10401-DPB10101 DPA10401-DPB10201 DPA10401-DPB10202 DPA10401-DPB10402 DPA10401-DPB10501 DPA10401-DPB110501 DPA10401-DPB14901
KEPPFLWAGIELAPDKWTVQ

SEQ ID NO: 7432 - protein, 20 aa, synthetic construct
  source 1..20: note = Seed: KEPPFLWMGYELHPDKWTVQ; note = HLAs: DPA10103-DPB10101 DPA10103-DPB10201 DPA10103-DPB10202 DPA10103-DPB10401 DPA10103-DPB10402 DPA10103-DPB10501 DPA10103-DPB110501 DPA10103-DPB112601 DPA10103-DPB11501 DPA10103-DPB11601 DPA10103-DPB11801 DPA10103-DPB11901 DPA10103-DPB12301 DPA10103-DPB13101 DPA10103-DPB13401 DPA10103-DPB13901 DPA10103-DPB14001 DPA10103-DPB14101 DPA10103-DPB14801 DPA10103-DPB14901 DPA10103-DPB15001 DPA10103-DPB15101 DPA10103-DPB15501 DPA10103-DPB15901 DPA10103-DPB18001 DPA10104-DPB10101 DPA10104-DPB11501 DPA10105-DPB10101 DPA10105-DPB10401 DPA10105-DPB11801 DPA10105-DPB15001 DPA10106-DPB10101 DPA10201-DPB10101 DPA10201-DPB10201 DPA10201-DPB10202 DPA10201-DPB10401 DPA10201-DPB10501 DPA10201-DPB110601 DPA10201-DPB11501 DPA10201-DPB11601 DPA10201-DPB11901 DPA10201-DPB13401 DPA10201-DPB15501 DPA10202-DPB10101 DPA10202-DPB10201 DPA10202-DPB10202 DPA10202-DPB10401 DPA10202-DPB10501 DPA10202-DPB110601 DPA10202-DPB11101 DPA10202-DPB11301 DPA10202-DPB11801 DPA10202-DPB11901 DPA10202-DPB13101 DPA10202-DPB13801; note = HLAs: DPA10202-DPB15501 DPA10202-DPB16501 DPA10301-DPB10101 DPA10301-DPB10201 DPA10301-DPB10202 DPA10301-DPB10401 DPA10301-DPB10402 DPA10301-DPB110501 DPA10301-DPB110601 DPA10301-DPB11101 DPA10301-DPB11301 DPA10301-DPB11801 DPA10301-DPB12301 DPA10301-DPB13901 DPA10301-DPB14001 DPA10301-DPB14901 DPA10301-DPB15501 DPA10301-DPB16501 DPA10301-DPB17501 DPA10301-DPB18001 DPA10401-DPB10101 DPA10401-DPB10201 DPA10401-DPB10202 DPA10401-DPB10402 DPA10401-DPB10501 DPA10401-DPB110501 DPA10401-DPB14901
KEPPILWTGFELRPDKWTVQ

SEQ ID NO: 7433 - protein, 14 aa, synthetic construct
  source 1..14: note = Seed: PPFLWMGYELHPDK; note = HLAs: DPA10103-DPB10101 DPA10103-DPB10201 DPA10103-DPB10202 DPA10103-DPB10401 DPA10103-DPB112601 DPA10103-DPB11501 DPA10103-DPB11601 DPA10103-DPB11901 DPA10103-DPB12301 DPA10103-DPB13101 DPA10103-DPB13401 DPA10103-DPB13901 DPA10103-DPB14001 DPA10103-DPB14101 DPA10103-DPB14801 DPA10103-DPB15001 DPA10103-DPB15901 DPA10104-DPB10101 DPA10104-DPB11501 DPA10105-DPB10101 DPA10105-DPB10401 DPA10105-DPB15001 DPA10106-DPB10101 DPA10201-DPB10101 DPA10201-DPB110601 DPA10201-DPB11501 DPA10201-DPB11601 DPA10201-DPB11901 DPA10202-DPB10101 DPA10202-DPB10201 DPA10202-DPB10202 DPA10202-DPB10401 DPA10202-DPB110601 DPA10202-DPB11901 DPA10202-DPB13101 DPA10202-DPB16501 DPA10301-DPB10201 DPA10301-DPB10202 DPA10301-DPB10401 DPA10301-DPB10402 DPA10301-DPB110501 DPA10301-DPB110601 DPA10301-DPB11801 DPA10301-DPB12301 DPA10301-DPB13901 DPA10301-DPB14001 DPA10301-DPB14901 DPA10301-DPB16501 DPA10301-DPB17501 DPA10301-DPB18001 DPA10401-DPB10101 DPA10401-DPB10201 DPA10401-DPB10202 DPA10401-DPB10402; note = HLAs: DPA10401-DPB10501 DPA10401-DPB110501 DPA10401-DPB14901
PPWLWRGFELIPDK

SEQ ID NO: 7434 - protein, 20 aa, synthetic construct
  source 1..20: note = Seed: KEPPFLWMGYELHPDKWTVQ; note = HLAs: DRB1_0101 DRB1_1001 DPA10103-DPB10101 DPA10103-DPB10201 DPA10103-DPB10202 DPA10103-DPB10401 DPA10103-DPB10402 DPA10103-DPB10501 DPA10103-DPB110501 DPA10103-DPB112601 DPA10103-DPB11501 DPA10103-DPB11601 DPA10103-DPB11801 DPA10103-DPB11901 DPA10103-DPB12301 DPA10103-DPB13101 DPA10103-DPB13401 DPA10103-DPB13901 DPA10103-DPB14001 DPA10103-DPB14101 DPA10103-DPB14801 DPA10103-DPB14901 DPA10103-DPB15001 DPA10103-DPB15101 DPA10103-DPB15501 DPA10103-DPB15901 DPA10103-DPB18001 DPA10104-DPB10101 DPA10104-DPB11501 DPA10105-DPB10101 DPA10105-DPB10401 DPA10105-DPB11801 DPA10105-DPB15001 DPA10106-DPB10101 DPA10201-DPB10101 DPA10201-DPB10201 DPA10201-DPB10202 DPA10201-DPB10401 DPA10201-DPB10501 DPA10201-DPB110601 DPA10201-DPB11501 DPA10201-DPB11601 DPA10201-DPB11901 DPA10201-DPB13401 DPA10201-DPB15501 DPA10202-DPB10101 DPA10202-DPB10201 DPA10202-DPB10202 DPA10202-DPB10401 DPA10202-DPB10501 DPA10202-DPB110601 DPA10202-DPB11101 DPA10202-DPB11301 DPA10202-DPB11801 DPA10202-DPB11901; note = HLAs: DPA10202-DPB13101 DPA10202-DPB13801 DPA10202-DPB15501 DPA10202-DPB16501 DPA10301-DPB10101 DPA10301-DPB10201 DPA10301-DPB10202 DPA10301-DPB10401 DPA10301-DPB10402 DPA10301-DPB110501 DPA10301-DPB110601 DPA10301-DPB11101 DPA10301-DPB11301 DPA10301-DPB11801 DPA10301-DPB12301 DPA10301-DPB13901 DPA10301-DPB14001 DPA10301-DPB14901 DPA10301-DPB15501 DPA10301-DPB16501 DPA10301-DPB17501 DPA10301-DPB18001 DPA10401-DPB10101 DPA10401-DPB10201 DPA10401-DPB10202 DPA10401-DPB10402 DPA10401-DPB10501 DPA10401-DPB110501 DPA10401-DPB14901
KEPPYLWEGIELLPDKWTVQ

SEQ ID NO: 7435 - protein, 20 aa, synthetic construct
  source 1..20: note = Seed: KEPPFLWMGYELHPDKWTVQ; note = HLAs: DRB1_0101 DRB1_0405 DRB1_1001 DPA10103-DPB10201 DPA10103-DPB10202 DPA10103-DPB10401 DPA10103-DPB10402 DPA10103-DPB10501 DPA10103-DPB110501 DPA10103-DPB112601 DPA10103-DPB11501 DPA10103-DPB11601 DPA10103-DPB11801 DPA10103-DPB11901 DPA10103-DPB12301 DPA10103-DPB13401 DPA10103-DPB13901 DPA10103-DPB14001 DPA10103-DPB14101 DPA10103-DPB14801 DPA10103-DPB14901 DPA10103-DPB15101 DPA10103-DPB15501 DPA10103-DPB15901 DPA10103-DPB18001 DPA10104-DPB11501 DPA10105-DPB10401 DPA10105-DPB11801 DPA10106-DPB10101 DPA10201-DPB10101 DPA10201-DPB10201 DPA10201-DPB10202 DPA10201-DPB10401 DPA10201-DPB10501 DPA10201-DPB110601 DPA10201-DPB11501 DPA10201-DPB11601 DPA10201-DPB11901 DPA10201-DPB13401 DPA10201-DPB15501 DPA10202-DPB10101 DPA10202-DPB10201 DPA10202-DPB10202 DPA10202-DPB10401 DPA10202-DPB10501 DPA10202-DPB110601 DPA10202-DPB11101 DPA10202-DPB11301 DPA10202-DPB11801 DPA10202-DPB11901 DPA10202-DPB13101 DPA10202-DPB13801 DPA10202-DPB15501 DPA10202-DPB16501 DPA10301-DPB10201 DPA10301-DPB10202; note = HLAs: DPA10301-DPB10401 DPA10301-DPB10402 DPA10301-DPB110501 DPA10301-DPB110601 DPA10301-DPB11101 DPA10301-DPB11301 DPA10301-DPB11801 DPA10301-DPB12301 DPA10301-DPB13901 DPA10301-DPB14001 DPA10301-DPB14901 DPA10301-DPB15501 DPA10301-DPB16501 DPA10301-DPB17501 DPA10301-DPB18001 DPA10401-DPB10201 DPA10401-DPB10202 DPA10401-DPB10402 DPA10401-DPB110501 DPA10401-DPB14901
KEPPYLWFGAELLPDKWTVQ

SEQ ID NO: 7436 - protein, 20 aa, synthetic construct
  source 1..20: note = Seed: KEPPFLWMGYELHPDKWTVQ; note = HLAs: DPA10103-DPB10101 DPA10103-DPB10201 DPA10103-DPB10202 DPA10103-DPB10401 DPA10103-DPB10402 DPA10103-DPB10501 DPA10103-DPB110501 DPA10103-DPB112601 DPA10103-DPB11501 DPA10103-DPB11601 DPA10103-DPB11801 DPA10103-DPB11901 DPA10103-DPB12301 DPA10103-DPB13101 DPA10103-DPB13401 DPA10103-DPB13901 DPA10103-DPB14001 DPA10103-DPB14101 DPA10103-DPB14801 DPA10103-DPB14901 DPA10103-DPB15001 DPA10103-DPB15101 DPA10103-DPB15501 DPA10103-DPB15901 DPA10103-DPB18001 DPA10104-DPB10101 DPA10104-DPB11501 DPA10105-DPB10101 DPA10105-DPB10401 DPA10105-DPB11801 DPA10105-DPB15001 DPA10106-DPB10101 DPA10201-DPB10101 DPA10201-DPB10201 DPA10201-DPB10202 DPA10201-DPB10401 DPA10201-DPB10501 DPA10201-DPB110601 DPA10201-DPB11501 DPA10201-DPB11601 DPA10201-DPB11901 DPA10201-DPB13401 DPA10201-DPB15501 DPA10202-DPB10101 DPA10202-DPB10201 DPA10202-DPB10202 DPA10202-DPB10401 DPA10202-DPB10501 DPA10202-DPB110601 DPA10202-DPB11301 DPA10202-DPB11801 DPA10202-DPB11901 DPA10202-DPB13101 DPA10202-DPB13801 DPA10202-DPB15501; note = HLAs: DPA10202-DPB16501 DPA10301-DPB10101 DPA10301-DPB10201 DPA10301-DPB10202 DPA10301-DPB10401 DPA10301-DPB10402 DPA10301-DPB110501 DPA10301-DPB110601 DPA10301-DPB11101 DPA10301-DPB11301 DPA10301-DPB11801 DPA10301-DPB12301 DPA10301-DPB13901 DPA10301-DPB14001 DPA10301-DPB14901 DPA10301-DPB15501 DPA10301-DPB16501 DPA10301-DPB17501 DPA10301-DPB18001 DPA10401-DPB10101 DPA10401-DPB10201 DPA10401-DPB10202 DPA10401-DPB10402 DPA10401-DPB10501 DPA10401-DPB110501 DPA10401-DPB14901
KEPPMLWNGFELFPDKWTVQ

SEQ ID NO: 7437 - protein, 20 aa, synthetic construct
  source 1..20: note = Seed: KEPPFLWMGYELHPDKWTVQ; note = HLAs: DPA10103-DPB10101 DPA10103-DPB10201 DPA10103-DPB10202 DPA10103-DPB10401 DPA10103-DPB10402 DPA10103-DPB10501 DPA10103-DPB110501 DPA10103-DPB112601 DPA10103-DPB11501 DPA10103-DPB11601 DPA10103-DPB11801 DPA10103-DPB11901 DPA10103-DPB12301 DPA10103-DPB13101 DPA10103-DPB13401 DPA10103-DPB13901 DPA10103-DPB14001 DPA10103-DPB14101 DPA10103-DPB14801 DPA10103-DPB14901 DPA10103-DPB15001 DPA10103-DPB15101 DPA10103-DPB15501 DPA10103-DPB15901 DPA10103-DPB18001 DPA10104-DPB10101 DPA10104-DPB11501 DPA10105-DPB10101 DPA10105-DPB10401 DPA10105-DPB11801 DPA10105-DPB15001 DPA10106-DPB10101 DPA10201-DPB10101 DPA10201-DPB10201 DPA10201-DPB10202 DPA10201-DPB10401 DPA10201-DPB10501 DPA10201-DPB110601 DPA10201-DPB11501 DPA10201-DPB11601 DPA10201-DPB11901 DPA10201-DPB13401 DPA10201-DPB15501 DPA10202-DPB10101 DPA10202-DPB10201 DPA10202-DPB10202 DPA10202-DPB10401 DPA10202-DPB10501 DPA10202-DPB110601 DPA10202-DPB11101 DPA10202-DPB11301 DPA10202-DPB11801 DPA10202-DPB11901 DPA10202-DPB13101 DPA10202-DPB13801; note = HLAs: DPA10202-DPB15501 DPA10202-DPB16501 DPA10301-DPB10101 DPA10301-DPB10201 DPA10301-DPB10202 DPA10301-DPB10401 DPA10301-DPB10402 DPA10301-DPB110501 DPA10301-DPB110601 DPA10301-DPB11101 DPA10301-DPB11301 DPA10301-DPB11801 DPA10301-DPB12301 DPA10301-DPB13901 DPA10301-DPB14001 DPA10301-DPB14901 DPA10301-DPB15501 DPA10301-DPB16501 DPA10301-DPB17501 DPA10301-DPB18001 DPA10401-DPB10101 DPA10401-DPB10201 DPA10401-DPB10202 DPA10401-DPB10402 DPA10401-DPB10501 DPA10401-DPB110501 DPA10401-DPB14901
KEPPYLWGGFELMPDKWTVQ

SEQ ID NO: 7438 - protein, 14 aa, synthetic construct
  source 1..14: note = Seed: PPFLWMGYELHPDK; note = HLAs: DRB1_1001 DPA10103-DPB10201 DPA10103-DPB10202 DPA10103-DPB10401 DPA10103-DPB112601 DPA10103-DPB11501 DPA10103-DPB11601 DPA10103-DPB11901 DPA10103-DPB12301 DPA10103-DPB13401 DPA10103-DPB13901 DPA10103-DPB14001 DPA10103-DPB14101 DPA10103-DPB14801 DPA10103-DPB15001 DPA10103-DPB15901 DPA10104-DPB11501 DPA10105-DPB10401 DPA10105-DPB15001 DPA10106-DPB10101 DPA10201-DPB10101 DPA10201-DPB110601 DPA10201-DPB11501 DPA10201-DPB11601 DPA10201-DPB11901 DPA10202-DPB10101 DPA10202-DPB10201 DPA10202-DPB10202 DPA10202-DPB110601 DPA10202-DPB11901 DPA10202-DPB13101 DPA10202-DPB16501 DPA10301-DPB10201 DPA10301-DPB10202 DPA10301-DPB10401 DPA10301-DPB10402 DPA10301-DPB110501 DPA10301-DPB110601 DPA10301-DPB11801 DPA10301-DPB12301 DPA10301-DPB13901 DPA10301-DPB14001 DPA10301-DPB14901 DPA10301-DPB15501 DPA10301-DPB17501 DPA10301-DPB18001 DPA10401-DPB10201 DPA10401-DPB10202 DPA10401-DPB10402 DPA10401-DPB10501 DPA10401-DPB110501 DPA10401-DPB14901
PPFLWIGIELAPDK

SEQ ID NO: 7439 - protein, 20 aa, synthetic construct
  source 1..20: note = Seed: KEPPFLWMGYELHPDKWTVQ; note = HLAs: DPA10103-DPB10101 DPA10103-DPB10201 DPA10103-DPB10202 DPA10103-DPB10402 DPA10103-DPB10501 DPA10103-DPB110501 DPA10103-DPB11601 DPA10103-DPB11901 DPA10103-DPB13101 DPA10103-DPB13401 DPA10103-DPB14001 DPA10103-DPB14101 DPA10103-DPB14801 DPA10103-DPB14901 DPA10103-DPB15001 DPA10103-DPB15101 DPA10103-DPB15501 DPA10103-DPB15901 DPA10103-DPB18001 DPA10104-DPB10101 DPA10105-DPB10101 DPA10105-DPB15001 DPA10201-DPB10201 DPA10201-DPB10202 DPA10201-DPB10401 DPA10201-DPB10501 DPA10201-DPB110601 DPA10201-DPB11501 DPA10201-DPB11601 DPA10201-DPB11901 DPA10201-DPB13401 DPA10201-DPB15501 DPA10202-DPB10201 DPA10202-DPB10202 DPA10202-DPB10401 DPA10202-DPB10501 DPA10202-DPB110601 DPA10202-DPB11101 DPA10202-DPB11301 DPA10202-DPB11801 DPA10202-DPB11901 DPA10202-DPB13101 DPA10202-DPB13801 DPA10202-DPB15501 DPA10301-DPB10402 DPA10301-DPB110501 DPA10301-DPB110601 DPA10301-DPB14901 DPA10301-DPB16501 DPA10301-DPB17501 DPA10301-DPB18001 DPA10401-DPB10101 DPA10401-DPB10201 DPA10401-DPB10202; note = HLAs: DPA10401-DPB10402 DPA10401-DPB10501 DPA10401-DPB110501 DPA10401-DPB14901
KEPPRLWMGFELLPDKWTVQ

SEQ ID NO: 7440 - protein, 14 aa, synthetic construct
  source 1..14: note = Seed: PPFLWMGYELHPDK; note = HLAs: DRB1_1001 DPA10103-DPB10101 DPA10103-DPB10201 DPA10103-DPB10202 DPA10103-DPB10401 DPA10103-DPB112601 DPA10103-DPB11501 DPA10103-DPB11601 DPA10103-DPB11901 DPA10103-DPB12301 DPA10103-DPB13101 DPA10103-DPB13401 DPA10103-DPB13901 DPA10103-DPB14001 DPA10103-DPB14101 DPA10103-DPB14801 DPA10103-DPB15001 DPA10103-DPB15901 DPA10104-DPB10101 DPA10104-DPB11501 DPA10105-DPB10101 DPA10105-DPB10401 DPA10105-DPB15001 DPA10106-DPB10101 DPA10201-DPB10101 DPA10201-DPB110601 DPA10201-DPB11501 DPA10201-DPB11601 DPA10201-DPB11901 DPA10202-DPB10101 DPA10202-DPB10201 DPA10202-DPB10202 DPA10202-DPB10401 DPA10202-DPB110601 DPA10202-DPB11901 DPA10202-DPB13101 DPA10202-DPB16501 DPA10301-DPB10101 DPA10301-DPB10201 DPA10301-DPB10202 DPA10301-DPB10401 DPA10301-DPB10402 DPA10301-DPB110501 DPA10301-DPB110601 DPA10301-DPB11801 DPA10301-DPB12301 DPA10301-DPB13901 DPA10301-DPB14001 DPA10301-DPB14901 DPA10301-DPB15501 DPA10301-DPB16501 DPA10301-DPB17501 DPA10301-DPB18001 DPA10401-DPB10101 DPA10401-DPB10201; note = HLAs: DPA10401-DPB10202 DPA10401-DPB10402 DPA10401-DPB10501 DPA10401-DPB110501 DPA10401-DPB14901
PPYLWLGFELEPDK

SEQ ID NO: 7441 - protein, 20 aa, synthetic construct
  source 1..20: note = Seed: KEPPFLWMGYELHPDKWTVQ; note = HLAs: DRB1_0101 DRB1_0405 DRB1_1001 DPA10103-DPB10101 DPA10103-DPB10201 DPA10103-DPB10202 DPA10103-DPB10401 DPA10103-DPB10402 DPA10103-DPB10501 DPA10103-DPB110501 DPA10103-DPB112601 DPA10103-DPB11501 DPA10103-DPB11601 DPA10103-DPB11801 DPA10103-DPB11901 DPA10103-DPB12301 DPA10103-DPB13101 DPA10103-DPB13401 DPA10103-DPB13901 DPA10103-DPB14001 DPA10103-DPB14101 DPA10103-DPB14801 DPA10103-DPB14901 DPA10103-DPB15001 DPA10103-DPB15101 DPA10103-DPB15501 DPA10103-DPB15901 DPA10103-DPB18001 DPA10104-DPB10101 DPA10104-DPB11501 DPA10105-DPB10101 DPA10105-DPB10401 DPA10105-DPB11801 DPA10105-DPB15001 DPA10106-DPB10101 DPA10201-DPB10101 DPA10201-DPB10201 DPA10201-DPB10202 DPA10201-DPB10501 DPA10201-DPB110601 DPA10201-DPB11501 DPA10201-DPB11601 DPA10201-DPB11901 DPA10201-DPB13401 DPA10201-DPB15501 DPA10202-DPB10101 DPA10202-DPB10201 DPA10202-DPB10202 DPA10202-DPB10401 DPA10202-DPB10501 DPA10202-DPB110601 DPA10202-DPB11101 DPA10202-DPB11301 DPA10202-DPB11801 DPA10202-DPB11901 DPA10202-DPB13101; note = HLAs: DPA10202-DPB13801 DPA10202-DPB15501 DPA10202-DPB16501 DPA10301-DPB10101 DPA10301-DPB10201 DPA10301-DPB10202 DPA10301-DPB10401 DPA10301-DPB10402 DPA10301-DPB110501 DPA10301-DPB110601 DPA10301-DPB11101 DPA10301-DPB11301 DPA10301-DPB11801 DPA10301-DPB12301 DPA10301-DPB13901 DPA10301-DPB14001 DPA10301-DPB14901 DPA10301-DPB15501 DPA10301-DPB16501 DPA10301-DPB17501 DPA10301-DPB18001 DPA10401-DPB10101 DPA10401-DPB10201 DPA10401-DPB10202 DPA10401-DPB10402 DPA10401-DPB10501 DPA10401-DPB110501 DPA10401-DPB14901
KEPPFLWSGIELSPDKWTVQ

SEQ ID NO: 7442 - protein, 20 aa, synthetic construct
  source 1..20: note = Seed: KEPPFLWMGYELHPDKWTVQ; note = HLAs: DPA10103-DPB10101 DPA10103-DPB10201 DPA10103-DPB10202 DPA10103-DPB10401 DPA10103-DPB10402 DPA10103-DPB10501 DPA10103-DPB110501 DPA10103-DPB112601 DPA10103-DPB11601 DPA10103-DPB11801 DPA10103-DPB11901 DPA10103-DPB12301 DPA10103-DPB13101 DPA10103-DPB13401 DPA10103-DPB13901 DPA10103-DPB14001 DPA10103-DPB14101 DPA10103-DPB14801 DPA10103-DPB14901 DPA10103-DPB15101 DPA10103-DPB15501 DPA10103-DPB15901 DPA10103-DPB18001 DPA10104-DPB10101 DPA10105-DPB10101 DPA10105-DPB10401 DPA10105-DPB11801 DPA10106-DPB10101 DPA10201-DPB10101 DPA10201-DPB10201 DPA10201-DPB10202 DPA10201-DPB10401 DPA10201-DPB10501 DPA10201-DPB110601 DPA10201-DPB11501 DPA10201-DPB11601 DPA10201-DPB11901 DPA10201-DPB13401 DPA10201-DPB15501 DPA10202-DPB10101 DPA10202-DPB10201 DPA10202-DPB10202 DPA10202-DPB10401 DPA10202-DPB10501 DPA10202-DPB110601 DPA10202-DPB11101 DPA10202-DPB11301 DPA10202-DPB11801 DPA10202-DPB11901 DPA10202-DPB13101 DPA10202-DPB13801 DPA10202-DPB16501 DPA10301-DPB10201 DPA10301-DPB10202; note = HLAs: DPA10301-DPB110601 DPA10301-DPB11301 DPA10301-DPB16501 DPA10301-DPB17501 DPA10401-DPB10101 DPA10401-DPB10201 DPA10401-DPB10202 DPA10401-DPB10402 DPA10401-DPB110501 DPA10401-DPB14901
KEPPCLWVGFELLPDKWTVQ

SEQ ID NO: 7443 - protein, 20 aa, synthetic construct
  source 1..20: note = Seed: KEPPFLWMGYELHPDKWTVQ; note = HLAs: DPA10103-DPB10101 DPA10103-DPB10201 DPA10103-DPB10202 DPA10103-DPB10401 DPA10103-DPB10402 DPA10103-DPB10501 DPA10103-DPB110501 DPA10103-DPB112601 DPA10103-DPB11601 DPA10103-DPB11901 DPA10103-DPB12301 DPA10103-DPB13101 DPA10103-DPB13401 DPA10103-DPB13901 DPA10103-DPB14001 DPA10103-DPB14101 DPA10103-DPB14801 DPA10103-DPB14901 DPA10103-DPB15001 DPA10103-DPB15101 DPA10103-DPB15501 DPA10103-DPB18001 DPA10104-DPB10101 DPA10105-DPB10101 DPA10105-DPB10401 DPA10105-DPB15001 DPA10106-DPB10101 DPA10201-DPB10101 DPA10201-DPB10201 DPA10201-DPB10202 DPA10201-DPB10401 DPA10201-DPB10501 DPA10201-DPB110601 DPA10201-DPB11501 DPA10201-DPB11601 DPA10201-DPB11901 DPA10201-DPB13401 DPA10201-DPB15501 DPA10202-DPB10101 DPA10202-DPB10401 DPA10202-DPB10501 DPA10202-DPB110601 DPA10202-DPB11101 DPA10202-DPB11301 DPA10202-DPB11801 DPA10202-DPB11901 DPA10202-DPB13101 DPA10202-DPB13801 DPA10202-DPB15501 DPA10202-DPB16501 DPA10301-DPB10101 DPA10301-DPB110601 DPA10301-DPB11101 DPA10301-DPB11301; note = HLAs: DPA10301-DPB15501 DPA10301-DPB16501 DPA10401-DPB10101 DPA10401-DPB10201 DPA10401-DPB10402 DPA10401-DPB10501 DPA10401-DPB110501 DPA10401-DPB14901
KEPPRLWIGFELFPDKWTVQ

SEQ ID NO: 7444 - protein, 20 aa, synthetic construct
  source 1..20: note = Seed: KEPPFLWMGYELHPDKWTVQ; note = HLAs: DPA10103-DPB10101 DPA10103-DPB10201 DPA10103-DPB10202 DPA10103-DPB10401 DPA10103-DPB10402 DPA10103-DPB10501 DPA10103-DPB110501 DPA10103-DPB112601 DPA10103-DPB11501 DPA10103-DPB11601 DPA10103-DPB11801 DPA10103-DPB11901 DPA10103-DPB12301 DPA10103-DPB13101 DPA10103-DPB13401 DPA10103-DPB13901 DPA10103-DPB14001 DPA10103-DPB14101 DPA10103-DPB14801 DPA10103-DPB14901 DPA10103-DPB15001 DPA10103-DPB15101 DPA10103-DPB15501 DPA10103-DPB15901 DPA10103-DPB18001 DPA10104-DPB10101 DPA10104-DPB11501 DPA10105-DPB10101 DPA10105-DPB10401 DPA10105-DPB11801 DPA10105-DPB15001 DPA10106-DPB10101 DPA10201-DPB10101 DPA10201-DPB10201 DPA10201-DPB10202 DPA10201-DPB10401 DPA10201-DPB110601 DPA10201-DPB11501 DPA10201-DPB11601 DPA10201-DPB11901 DPA10201-DPB13401 DPA10201-DPB15501 DPA10202-DPB10101 DPA10202-DPB10201 DPA10202-DPB10202 DPA10202-DPB10401 DPA10202-DPB10501 DPA10202-DPB110601 DPA10202-DPB11101 DPA10202-DPB11301 DPA10202-DPB11801 DPA10202-DPB11901 DPA10202-DPB13101 DPA10202-DPB13801 DPA10202-DPB15501; note = HLAs: DPA10202-DPB16501 DPA10301-DPB10101 DPA10301-DPB10201 DPA10301-DPB10202 DPA10301-DPB10401 DPA10301-DPB10402 DPA10301-DPB110501 DPA10301-DPB110601 DPA10301-DPB11101 DPA10301-DPB11301 DPA10301-DPB11801 DPA10301-DPB12301 DPA10301-DPB13901 DPA10301-DPB14001 DPA10301-DPB14901 DPA10301-DPB15501 DPA10301-DPB16501 DPA10301-DPB17501 DPA10301-DPB18001 DPA10401-DPB10101 DPA10401-DPB10201 DPA10401-DPB10202 DPA10401-DPB10402 DPA10401-DPB10501 DPA10401-DPB110501 DPA10401-DPB14901
KEPPYLWNGYELLPDKWTVQ

SEQ ID NO: 7445 - protein, 14 aa, synthetic construct
  source 1..14: note = Seed: PPFLWMGYELHPDK; note = HLAs: DPA10103-DPB10101 DPA10103-DPB10201 DPA10103-DPB10202 DPA10103-DPB10401 DPA10103-DPB112601 DPA10103-DPB11501 DPA10103-DPB11601 DPA10103-DPB11901 DPA10103-DPB12301 DPA10103-DPB13101 DPA10103-DPB13401 DPA10103-DPB13901 DPA10103-DPB14001 DPA10103-DPB14101 DPA10103-DPB14801 DPA10103-DPB15001 DPA10103-DPB15901 DPA10104-DPB10101 DPA10104-DPB11501 DPA10105-DPB10101 DPA10105-DPB10401 DPA10105-DPB15001 DPA10106-DPB10101 DPA10201-DPB10101 DPA10201-DPB110601 DPA10201-DPB11501 DPA10201-DPB11601 DPA10201-DPB11901 DPA10202-DPB10101 DPA10202-DPB10201 DPA10202-DPB10202 DPA10202-DPB10401 DPA10202-DPB110601 DPA10202-DPB11901 DPA10202-DPB13101 DPA10202-DPB16501 DPA10301-DPB10101 DPA10301-DPB10201 DPA10301-DPB10202 DPA10301-DPB10401 DPA10301-DPB10402 DPA10301-DPB110501 DPA10301-DPB110601 DPA10301-DPB11801 DPA10301-DPB12301 DPA10301-DPB13901 DPA10301-DPB14001 DPA10301-DPB14901 DPA10301-DPB15501 DPA10301-DPB16501 DPA10301-DPB17501 DPA10301-DPB18001 DPA10401-DPB10101 DPA10401-DPB10201; note = HLAs: DPA10401-DPB10202 DPA10401-DPB10402 DPA10401-DPB10501 DPA10401-DPB110501 DPA10401-DPB14901
PPFLWHGLELAPDK

SEQ ID NO: 7446 - protein, 20 aa, synthetic construct
  source 1..20: note = Seed: KEPPFLWMGYELHPDKWTVQ; note = HLAs: DPA10103-DPB10101 DPA10103-DPB10201 DPA10103-DPB10202 DPA10103-DPB10401 DPA10103-DPB10402 DPA10103-DPB10501 DPA10103-DPB110501 DPA10103-DPB112601 DPA10103-DPB11501 DPA10103-DPB11601 DPA10103-DPB11801 DPA10103-DPB11901 DPA10103-DPB12301 DPA10103-DPB13101 DPA10103-DPB13401 DPA10103-DPB13901 DPA10103-DPB14001 DPA10103-DPB14101 DPA10103-DPB14801 DPA10103-DPB14901 DPA10103-DPB15001 DPA10103-DPB15101 DPA10103-DPB15501 DPA10103-DPB15901 DPA10103-DPB18001 DPA10104-DPB10101 DPA10104-DPB11501 DPA10105-DPB10101 DPA10105-DPB10401 DPA10105-DPB11801 DPA10105-DPB15001 DPA10106-DPB10101 DPA10201-DPB10101 DPA10201-DPB10201 DPA10201-DPB10202 DPA10201-DPB10401 DPA10201-DPB10501 DPA10201-DPB110601 DPA10201-DPB11501 DPA10201-DPB11601 DPA10201-DPB11901 DPA10201-DPB13401 DPA10201-DPB15501 DPA10202-DPB10101 DPA10202-DPB10201 DPA10202-DPB10202 DPA10202-DPB10401 DPA10202-DPB10501 DPA10202-DPB110601 DPA10202-DPB11101 DPA10202-DPB11301 DPA10202-DPB11801 DPA10202-DPB11901 DPA10202-DPB13101 DPA10202-DPB13801; note = HLAs: DPA10202-DPB15501 DPA10202-DPB16501 DPA10301-DPB10101 DPA10301-DPB10201 DPA10301-DPB10202 DPA10301-DPB10401 DPA10301-DPB10402 DPA10301-DPB110501 DPA10301-DPB110601 DPA10301-DPB11101 DPA10301-DPB11301 DPA10301-DPB11801 DPA10301-DPB12301 DPA10301-DPB13901 DPA10301-DPB14001 DPA10301-DPB14901 DPA10301-DPB15501 DPA10301-DPB16501 DPA10301-DPB17501 DPA10301-DPB18001 DPA10401-DPB10101 DPA10401-DPB10201 DPA10401-DPB10202 DPA10401-DPB10402 DPA10401-DPB10501 DPA10401-DPB110501 DPA10401-DPB14901
KEPPWLWHGLELIPDKWTVQ

SEQ ID NO: 7447 - protein, 20 aa, synthetic construct
  source 1..20: note = Seed: KEPPFLWMGYELHPDKWTVQ; note = HLAs: DRB1_0101 DRB1_0405 DRB1_1001 DPA10103-DPB10101 DPA10103-DPB10202 DPA10103-DPB10401 DPA10103-DPB10501 DPA10103-DPB112601 DPA10103-DPB11501 DPA10103-DPB11601 DPA10103-DPB11801 DPA10103-DPB11901 DPA10103-DPB12301 DPA10103-DPB13101 DPA10103-DPB13401 DPA10103-DPB13901 DPA10103-DPB14001 DPA10103-DPB14101 DPA10103-DPB15001 DPA10103-DPB15501 DPA10103-DPB15901 DPA10104-DPB10101 DPA10104-DPB11501 DPA10105-DPB10101 DPA10105-DPB10401 DPA10105-DPB11801 DPA10105-DPB15001 DPA10106-DPB10101 DPA10201-DPB10101 DPA10201-DPB10401 DPA10201-DPB10501 DPA10201-DPB110601 DPA10201-DPB11501 DPA10201-DPB11601 DPA10201-DPB11901 DPA10201-DPB15501 DPA10202-DPB10101 DPA10202-DPB10202 DPA10202-DPB10501 DPA10202-DPB110601 DPA10202-DPB11101 DPA10202-DPB11801 DPA10202-DPB11901 DPA10202-DPB13101 DPA10202-DPB13801 DPA10202-DPB15501 DPA10202-DPB16501 DPA10301-DPB10101 DPA10301-DPB10201 DPA10301-DPB10202 DPA10301-DPB10401 DPA10301-DPB10402 DPA10301-DPB110501 DPA10301-DPB110601 DPA10301-DPB11101 DPA10301-DPB11301; note = HLAs: DPA10301-DPB11801 DPA10301-DPB12301 DPA10301-DPB13901 DPA10301-DPB14001 DPA10301-DPB14901 DPA10301-DPB15501 DPA10301-DPB16501 DPA10301-DPB17501 DPA10301-DPB18001 DPA10401-DPB10101 DPA10401-DPB10201 DPA10401-DPB10202 DPA10401-DPB10402 DPA10401-DPB10501 DPA10401-DPB110501 DPA10401-DPB14901
KEPPFLWIGIELEPDKWTVQ

SEQ ID NO: 7448 - protein, 20 aa, synthetic construct
  source 1..20: note = Seed: KEPPFLWMGYELHPDKWTVQ; note = HLAs: DPA10103-DPB10101 DPA10103-DPB10201 DPA10103-DPB10202 DPA10103-DPB10401 DPA10103-DPB10402 DPA10103-DPB10501 DPA10103-DPB110501 DPA10103-DPB112601 DPA10103-DPB11501 DPA10103-DPB11601 DPA10103-DPB11801 DPA10103-DPB11901 DPA10103-DPB12301 DPA10103-DPB13101 DPA10103-DPB13401 DPA10103-DPB13901 DPA10103-DPB14001 DPA10103-DPB14101 DPA10103-DPB14801 DPA10103-DPB14901 DPA10103-DPB15001 DPA10103-DPB15101 DPA10103-DPB15501 DPA10103-DPB15901 DPA10103-DPB18001 DPA10104-DPB10101 DPA10104-DPB11501 DPA10105-DPB10101 DPA10105-DPB10401 DPA10105-DPB11801 DPA10105-DPB15001 DPA10106-DPB10101 DPA10201-DPB10101 DPA10201-DPB10201 DPA10201-DPB10202 DPA10201-DPB10401 DPA10201-DPB110601 DPA10201-DPB11501 DPA10201-DPB11601 DPA10201-DPB11901 DPA10201-DPB13401 DPA10201-DPB15501 DPA10202-DPB10101 DPA10202-DPB10201 DPA10202-DPB10202 DPA10202-DPB10401 DPA10202-DPB10501 DPA10202-DPB110601 DPA10202-DPB11301 DPA10202-DPB11801 DPA10202-DPB11901 DPA10202-DPB13101 DPA10202-DPB13801 DPA10202-DPB15501 DPA10202-DPB16501; note = HLAs: DPA10301-DPB10101 DPA10301-DPB10201 DPA10301-DPB10202 DPA10301-DPB10401 DPA10301-DPB10402 DPA10301-DPB110501 DPA10301-DPB110601 DPA10301-DPB11101 DPA10301-DPB11301 DPA10301-DPB11801 DPA10301-DPB12301 DPA10301-DPB13901 DPA10301-DPB14001 DPA10301-DPB14901 DPA10301-DPB15501 DPA10301-DPB16501 DPA10301-DPB17501 DPA10301-DPB18001 DPA10401-DPB10101 DPA10401-DPB10201 DPA10401-DPB10202 DPA10401-DPB10402 DPA10401-DPB10501 DPA10401-DPB110501 DPA10401-DPB14901
KEPPILWCGFELVPDKWTVQ

SEQ ID NO: 7449 - protein, 14 aa, synthetic construct
  source 1..14: note = Seed: PPFLWMGYELHPDK; note = HLAs: DPA10103-DPB10101 DPA10103-DPB10201 DPA10103-DPB10202 DPA10103-DPB10401 DPA10103-DPB112601 DPA10103-DPB11501 DPA10103-DPB11601 DPA10103-DPB11901 DPA10103-DPB12301 DPA10103-DPB13101 DPA10103-DPB13401 DPA10103-DPB13901 DPA10103-DPB14001 DPA10103-DPB14101 DPA10103-DPB14801 DPA10103-DPB15001 DPA10103-DPB15901 DPA10104-DPB10101 DPA10104-DPB11501 DPA10105-DPB10101 DPA10105-DPB10401 DPA10105-DPB15001 DPA10106-DPB10101 DPA10201-DPB10101 DPA10201-DPB110601 DPA10201-DPB11501 DPA10201-DPB11601 DPA10201-DPB11901 DPA10202-DPB10101 DPA10202-DPB10201 DPA10202-DPB10202 DPA10202-DPB10401 DPA10202-DPB110601 DPA10202-DPB11901 DPA10202-DPB13101 DPA10202-DPB16501 DPA10301-DPB10101 DPA10301-DPB10201 DPA10301-DPB10202 DPA10301-DPB10401 DPA10301-DPB10402 DPA10301-DPB110501 DPA10301-DPB110601 DPA10301-DPB11801 DPA10301-DPB12301 DPA10301-DPB13901 DPA10301-DPB14001 DPA10301-DPB14901 DPA10301-DPB15501 DPA10301-DPB16501 DPA10301-DPB17501 DPA10301-DPB18001 DPA10401-DPB10101 DPA10401-DPB10201; note = HLAs: DPA10401-DPB10202 DPA10401-DPB10402 DPA10401-DPB10501 DPA10401-DPB110501 DPA10401-DPB14901
PPMLWDGFELLPDK

SEQ ID NO: 7450 - protein, 20 aa, synthetic construct
  source 1..20: note = Seed: KEPPFLWMGYELHPDKWTVQ; note = HLAs: DPA10103-DPB10101 DPA10103-DPB10201 DPA10103-DPB10202 DPA10103-DPB10401 DPA10103-DPB10402 DPA10103-DPB10501 DPA10103-DPB110501 DPA10103-DPB112601 DPA10103-DPB11501 DPA10103-DPB11601 DPA10103-DPB11801 DPA10103-DPB11901 DPA10103-DPB12301 DPA10103-DPB13101 DPA10103-DPB13401 DPA10103-DPB13901 DPA10103-DPB14001 DPA10103-DPB14101 DPA10103-DPB14801 DPA10103-DPB14901 DPA10103-DPB15001 DPA10103-DPB15101 DPA10103-DPB15501 DPA10103-DPB15901 DPA10103-DPB18001 DPA10104-DPB10101 DPA10104-DPB11501 DPA10105-DPB10101 DPA10105-DPB10401 DPA10105-DPB11801 DPA10105-DPB15001 DPA10106-DPB10101 DPA10201-DPB10101 DPA10201-DPB10201 DPA10201-DPB10202 DPA10201-DPB10401 DPA10201-DPB10501 DPA10201-DPB110601 DPA10201-DPB11501 DPA10201-DPB11601 DPA10201-DPB11901 DPA10201-DPB13401 DPA10201-DPB15501 DPA10202-DPB10101 DPA10202-DPB10201 DPA10202-DPB10202 DPA10202-DPB10401 DPA10202-DPB10501 DPA10202-DPB110601 DPA10202-DPB11101 DPA10202-DPB11301 DPA10202-DPB11801 DPA10202-DPB11901 DPA10202-DPB13101 DPA10202-DPB13801; note = HLAs: DPA10202-DPB15501 DPA10202-DPB16501 DPA10301-DPB10101 DPA10301-DPB10201 DPA10301-DPB10202 DPA10301-DPB10402 DPA10301-DPB110501 DPA10301-DPB110601 DPA10301-DPB11101 DPA10301-DPB11301 DPA10301-DPB14001 DPA10301-DPB14901 DPA10301-DPB15501 DPA10301-DPB16501 DPA10301-DPB17501 DPA10301-DPB18001 DPA10401-DPB10101 DPA10401-DPB10201 DPA10401-DPB10202 DPA10401-DPB10402 DPA10401-DPB10501 DPA10401-DPB110501 DPA10401-DPB14901
KEPPRLWLGFELIPDKWTVQ

SEQ ID NO: 7451 - protein, 20 aa, synthetic construct
  source 1..20: note = Seed: KEPPFLWMGYELHPDKWTVQ; note = HLAs: DRB1_0101 DRB1_0405 DRB1_1001 DPA10103-DPB10101 DPA10103-DPB10201 DPA10103-DPB10202 DPA10103-DPB10401 DPA10103-DPB10501 DPA10103-DPB112601 DPA10103-DPB11501 DPA10103-DPB11601 DPA10103-DPB11801 DPA10103-DPB11901 DPA10103-DPB12301 DPA10103-DPB13101 DPA10103-DPB13401 DPA10103-DPB13901 DPA10103-DPB14001 DPA10103-DPB14101 DPA10103-DPB14801 DPA10103-DPB15001 DPA10103-DPB15501 DPA10103-DPB15901 DPA10104-DPB10101 DPA10104-DPB11501 DPA10105-DPB10101 DPA10105-DPB10401 DPA10105-DPB11801 DPA10105-DPB15001 DPA10106-DPB10101 DPA10201-DPB10101 DPA10201-DPB10201 DPA10201-DPB10202 DPA10201-DPB10401 DPA10201-DPB10501 DPA10201-DPB110601 DPA10201-DPB11501 DPA10201-DPB11601 DPA10201-DPB11901 DPA10201-DPB13401 DPA10201-DPB15501 DPA10202-DPB10101 DPA10202-DPB10201 DPA10202-DPB10202 DPA10202-DPB10401 DPA10202-DPB10501 DPA10202-DPB110601 DPA10202-DPB11101 DPA10202-DPB11301 DPA10202-DPB11801 DPA10202-DPB11901 DPA10202-DPB13101 DPA10202-DPB13801 DPA10202-DPB15501 DPA10202-DPB16501 DPA10301-DPB10101; note = HLAs: DPA10301-DPB10201 DPA10301-DPB10202 DPA10301-DPB10401 DPA10301-DPB10402 DPA10301-DPB110501 DPA10301-DPB110601 DPA10301-DPB11101 DPA10301-DPB11301 DPA10301-DPB11801 DPA10301-DPB12301 DPA10301-DPB13901 DPA10301-DPB14001 DPA10301-DPB14901 DPA10301-DPB15501 DPA10301-DPB16501 DPA10301-DPB17501 DPA10301-DPB18001 DPA10401-DPB10101 DPA10401-DPB10201 DPA10401-DPB10202 DPA10401-DPB10402 DPA10401-DPB10501 DPA10401-DPB110501 DPA10401-DPB14901
KEPPFLWQGVELVPDKWTVQ

SEQ ID NO: 7452 - protein, 20 aa, synthetic construct
  source 1..20: note = Seed: KEPPFLWMGYELHPDKWTVQ; note = HLAs: DRB1_0101 DRB1_0405 DRB1_1001 DPA10103-DPB10201 DPA10103-DPB10202 DPA10103-DPB10401 DPA10103-DPB10402 DPA10103-DPB10501 DPA10103-DPB110501 DPA10103-DPB112601 DPA10103-DPB11501 DPA10103-DPB11601 DPA10103-DPB11801 DPA10103-DPB11901 DPA10103-DPB12301 DPA10103-DPB13401 DPA10103-DPB13901 DPA10103-DPB14001 DPA10103-DPB14101 DPA10103-DPB14801 DPA10103-DPB14901 DPA10103-DPB15101 DPA10103-DPB15501 DPA10103-DPB15901 DPA10103-DPB18001 DPA10104-DPB11501 DPA10105-DPB10401 DPA10105-DPB11801 DPA10106-DPB10101 DPA10201-DPB10101 DPA10201-DPB10201 DPA10201-DPB10202 DPA10201-DPB10401 DPA10201-DPB10501 DPA10201-DPB110601 DPA10201-DPB11501 DPA10201-DPB11601 DPA10201-DPB11901 DPA10201-DPB15501 DPA10202-DPB10101 DPA10202-DPB10201 DPA10202-DPB10202 DPA10202-DPB10501 DPA10202-DPB110601 DPA10202-DPB11101 DPA10202-DPB11801 DPA10202-DPB11901 DPA10202-DPB13101 DPA10202-DPB13801 DPA10202-DPB15501 DPA10202-DPB16501 DPA10301-DPB10201 DPA10301-DPB10202 DPA10301-DPB10401 DPA10301-DPB10402 DPA10301-DPB110501; note = HLAs: DPA10301-DPB110601 DPA10301-DPB11101 DPA10301-DPB11301 DPA10301-DPB11801 DPA10301-DPB12301 DPA10301-DPB13901 DPA10301-DPB14001 DPA10301-DPB14901 DPA10301-DPB15501 DPA10301-DPB17501 DPA10301-DPB18001 DPA10401-DPB10201 DPA10401-DPB10202 DPA10401-DPB10402 DPA10401-DPB10501 DPA10401-DPB110501 DPA10401-DPB14901
KEPPFLWFGIELAPDKWTVQ

SEQ ID NO: 7453 - protein, 20 aa, synthetic construct
  source 1..20: note = Seed: KEPPFLWMGYELHPDKWTVQ; note = HLAs: DRB1_0101 DRB1_1001 DPA10103-DPB10101 DPA10103-DPB10201 DPA10103-DPB10202 DPA10103-DPB10401 DPA10103-DPB10501 DPA10103-DPB112601 DPA10103-DPB11501 DPA10103-DPB11601 DPA10103-DPB11801 DPA10103-DPB11901 DPA10103-DPB12301 DPA10103-DPB13401 DPA10103-DPB13901 DPA10103-DPB14001 DPA10103-DPB14101 DPA10103-DPB14801 DPA10103-DPB15001 DPA10103-DPB15501 DPA10103-DPB15901 DPA10104-DPB10101 DPA10104-DPB11501 DPA10105-DPB10101 DPA10105-DPB10401 DPA10105-DPB11801 DPA10105-DPB15001 DPA10106-DPB10101 DPA10201-DPB10101 DPA10201-DPB10201 DPA10201-DPB10202 DPA10201-DPB10401 DPA10201-DPB110601 DPA10201-DPB11501 DPA10201-DPB11601 DPA10201-DPB11901 DPA10201-DPB13401 DPA10202-DPB10101 DPA10202-DPB10201 DPA10202-DPB10202 DPA10202-DPB10401 DPA10202-DPB10501 DPA10202-DPB110601 DPA10202-DPB11801 DPA10202-DPB11901 DPA10202-DPB13101 DPA10202-DPB13801 DPA10202-DPB15501 DPA10202-DPB16501 DPA10301-DPB10101 DPA10301-DPB10201 DPA10301-DPB10202 DPA10301-DPB10401 DPA10301-DPB10402 DPA10301-DPB110501; note = HLAs: DPA10301-DPB110601 DPA10301-DPB11101 DPA10301-DPB11301 DPA10301-DPB11801 DPA10301-DPB12301 DPA10301-DPB13901 DPA10301-DPB14001 DPA10301-DPB14901 DPA10301-DPB15501 DPA10301-DPB16501 DPA10301-DPB17501 DPA10301-DPB18001 DPA10401-DPB10101 DPA10401-DPB10201 DPA10401-DPB10202 DPA10401-DPB10402 DPA10401-DPB10501 DPA10401-DPB110501 DPA10401-DPB14901
KEPPILWSGIELLPDKWTVQ

SEQ ID NO: 7454 - protein, 20 aa, synthetic construct
  source 1..20: note = Seed: KEPPFLWMGYELHPDKWTVQ; note = HLAs: DPA10103-DPB10101 DPA10103-DPB10201 DPA10103-DPB10202 DPA10103-DPB10401 DPA10103-DPB10501 DPA10103-DPB112601 DPA10103-DPB11501 DPA10103-DPB11601 DPA10103-DPB11801 DPA10103-DPB11901 DPA10103-DPB12301 DPA10103-DPB13101 DPA10103-DPB13401 DPA10103-DPB13901 DPA10103-DPB14001 DPA10103-DPB14101 DPA10103-DPB14801 DPA10103-DPB15001 DPA10103-DPB15501 DPA10103-DPB15901 DPA10104-DPB10101 DPA10104-DPB11501 DPA10105-DPB10101 DPA10105-DPB10401 DPA10105-DPB11801 DPA10105-DPB15001 DPA10106-DPB10101 DPA10201-DPB10101 DPA10201-DPB10201 DPA10201-DPB10202 DPA10201-DPB10401 DPA10201-DPB10501 DPA10201-DPB110601 DPA10201-DPB11501 DPA10201-DPB11601 DPA10201-DPB11901 DPA10201-DPB13401 DPA10201-DPB15501 DPA10202-DPB10101 DPA10202-DPB10201 DPA10202-DPB10202 DPA10202-DPB10401 DPA10202-DPB10501 DPA10202-DPB110601 DPA10202-DPB11301 DPA10202-DPB11801 DPA10202-DPB11901 DPA10202-DPB13101 DPA10202-DPB13801 DPA10202-DPB15501 DPA10202-DPB16501 DPA10301-DPB10101 DPA10301-DPB10201 DPA10301-DPB10202 DPA10301-DPB10401; note = HLAs: DPA10301-DPB10402 DPA10301-DPB110501 DPA10301-DPB110601 DPA10301-DPB11101 DPA10301-DPB11301 DPA10301-DPB11801 DPA10301-DPB12301 DPA10301-DPB13901 DPA10301-DPB14001 DPA10301-DPB14901 DPA10301-DPB15501 DPA10301-DPB16501 DPA10301-DPB17501 DPA10301-DPB18001 DPA10401-DPB10101 DPA10401-DPB10201 DPA10401-DPB10202 DPA10401-DPB10402 DPA10401-DPB10501 DPA10401-DPB110501 DPA10401-DPB14901
KEPPILWHGLELIPDKWTVQ

SEQ ID NO: 7455 - protein, 20 aa, synthetic construct
  source 1..20: note = Seed: KEPPFLWMGYELHPDKWTVQ; note = HLAs: DRB1_0101 DRB1_1001 DPA10103-DPB10101 DPA10103-DPB10201 DPA10103-DPB10202 DPA10103-DPB10401 DPA10103-DPB10402 DPA10103-DPB10501 DPA10103-DPB110501 DPA10103-DPB112601 DPA10103-DPB11501 DPA10103-DPB11601 DPA10103-DPB11801 DPA10103-DPB11901 DPA10103-DPB12301 DPA10103-DPB13101 DPA10103-DPB13401 DPA10103-DPB13901 DPA10103-DPB14001 DPA10103-DPB14101 DPA10103-DPB14801 DPA10103-DPB14901 DPA10103-DPB15001 DPA10103-DPB15101 DPA10103-DPB15901 DPA10103-DPB18001 DPA10104-DPB10101 DPA10104-DPB11501 DPA10105-DPB10101 DPA10105-DPB10401 DPA10105-DPB11801 DPA10105-DPB15001 DPA10106-DPB10101 DPA10201-DPB10101 DPA10201-DPB10201 DPA10201-DPB10202 DPA10201-DPB10401 DPA10201-DPB10501 DPA10201-DPB110601 DPA10201-DPB11501 DPA10201-DPB11601 DPA10201-DPB11901 DPA10202-DPB10101 DPA10202-DPB10201 DPA10202-DPB10202 DPA10202-DPB10401 DPA10202-DPB10501 DPA10202-DPB110601 DPA10202-DPB11101 DPA10202-DPB11301 DPA10202-DPB11801 DPA10202-DPB11901 DPA10202-DPB13101 DPA10202-DPB13801 DPA10202-DPB15501; note = HLAs: DPA10202-DPB16501 DPA10301-DPB10101 DPA10301-DPB10201 DPA10301-DPB10202 DPA10301-DPB10401 DPA10301-DPB10402 DPA10301-DPB110501 DPA10301-DPB110601 DPA10301-DPB11101 DPA10301-DPB11301 DPA10301-DPB11801 DPA10301-DPB12301 DPA10301-DPB13901 DPA10301-DPB14001 DPA10301-DPB14901 DPA10301-DPB15501 DPA10301-DPB16501 DPA10301-DPB17501 DPA10301-DPB18001 DPA10401-DPB10101 DPA10401-DPB10201 DPA10401-DPB10202 DPA10401-DPB10402 DPA10401-DPB10501 DPA10401-DPB110501 DPA10401-DPB14901
KEPPFLWEGLELTPDKWTVQ

SEQ ID NO: 7456 - protein, 20 aa, synthetic construct
  source 1..20: note = Seed: KEPPFLWMGYELHPDKWTVQ; note = HLAs: DPA10103-DPB10101 DPA10103-DPB10201 DPA10103-DPB10202 DPA10103-DPB10402 DPA10103-DPB10501 DPA10103-DPB110501 DPA10103-DPB11601 DPA10103-DPB11901 DPA10103-DPB13101 DPA10103-DPB13401 DPA10103-DPB14001 DPA10103-DPB14801 DPA10103-DPB14901 DPA10103-DPB15001 DPA10103-DPB15101 DPA10103-DPB15501 DPA10103-DPB18001 DPA10104-DPB10101 DPA10105-DPB10101 DPA10105-DPB15001 DPA10201-DPB10501 DPA10201-DPB110601 DPA10201-DPB11601 DPA10201-DPB11901 DPA10201-DPB13401 DPA10201-DPB15501 DPA10202-DPB10501 DPA10202-DPB110601 DPA10202-DPB11101 DPA10202-DPB11801 DPA10202-DPB11901 DPA10202-DPB13101 DPA10202-DPB13801 DPA10202-DPB15501 DPA10301-DPB110601 DPA10301-DPB16501 DPA10401-DPB10501
KEPPKLWIGFELLPDKWTVQ

SEQ ID NO: 7457 - protein, 20 aa, synthetic construct
  source 1..20: note = Seed: KEPPFLWMGYELHPDKWTVQ; note = HLAs: DPA10103-DPB10101 DPA10103-DPB10201 DPA10103-DPB10202 DPA10103-DPB10401 DPA10103-DPB10402 DPA10103-DPB10501 DPA10103-DPB110501 DPA10103-DPB112601 DPA10103-DPB11501 DPA10103-DPB11601 DPA10103-DPB11801 DPA10103-DPB11901 DPA10103-DPB12301 DPA10103-DPB13101 DPA10103-DPB13401 DPA10103-DPB13901 DPA10103-DPB14001 DPA10103-DPB14101 DPA10103-DPB14801 DPA10103-DPB14901 DPA10103-DPB15001 DPA10103-DPB15101 DPA10103-DPB15501 DPA10103-DPB15901 DPA10103-DPB18001 DPA10104-DPB10101 DPA10104-DPB11501 DPA10105-DPB10101 DPA10105-DPB10401 DPA10105-DPB11801 DPA10105-DPB15001 DPA10106-DPB10101 DPA10201-DPB10101 DPA10201-DPB10201 DPA10201-DPB10202 DPA10201-DPB10401 DPA10201-DPB110601 DPA10201-DPB11501 DPA10201-DPB11601 DPA10201-DPB11901 DPA10201-DPB13401 DPA10201-DPB15501 DPA10202-DPB10101 DPA10202-DPB10201 DPA10202-DPB10202 DPA10202-DPB10401 DPA10202-DPB10501 DPA10202-DPB110601 DPA10202-DPB11101 DPA10202-DPB11301 DPA10202-DPB11801 DPA10202-DPB11901 DPA10202-DPB13101 DPA10202-DPB13801 DPA10202-DPB15501; note = HLAs: DPA10202-DPB16501 DPA10301-DPB10101 DPA10301-DPB10201 DPA10301-DPB10202 DPA10301-DPB10401 DPA10301-DPB10402 DPA10301-DPB110501 DPA10301-DPB110601 DPA10301-DPB11101 DPA10301-DPB11301 DPA10301-DPB11801 DPA10301-DPB12301 DPA10301-DPB13901 DPA10301-DPB14001 DPA10301-DPB14901 DPA10301-DPB15501 DPA10301-DPB16501 DPA10301-DPB17501 DPA10301-DPB18001 DPA10401-DPB10101 DPA10401-DPB10201 DPA10401-DPB10202 DPA10401-DPB10402 DPA10401-DPB10501 DPA10401-DPB110501 DPA10401-DPB14901
KEPPILWSGFELDPDKWTVQ

SEQ ID NO: 7458 - protein, 20 aa, synthetic construct
  source 1..20: note = Seed: KEPPFLWMGYELHPDKWTVQ; note = HLAs: DRB1_1001 DPA10103-DPB10101 DPA10103-DPB10201 DPA10103-DPB10202 DPA10103-DPB10401 DPA10103-DPB10402 DPA10103-DPB10501 DPA10103-DPB110501 DPA10103-DPB112601 DPA10103-DPB11501 DPA10103-DPB11601 DPA10103-DPB11801 DPA10103-DPB11901 DPA10103-DPB12301 DPA10103-DPB13101 DPA10103-DPB13401 DPA10103-DPB13901 DPA10103-DPB14001 DPA10103-DPB14801 DPA10103-DPB14901 DPA10103-DPB15001 DPA10103-DPB15101 DPA10103-DPB15501 DPA10103-DPB18001 DPA10104-DPB10101 DPA10104-DPB11501 DPA10105-DPB10101 DPA10105-DPB10401 DPA10105-DPB11801 DPA10105-DPB15001 DPA10106-DPB10101 DPA10201-DPB10101 DPA10201-DPB10501 DPA10201-DPB110601 DPA10201-DPB11501 DPA10201-DPB11601 DPA10201-DPB11901 DPA10202-DPB10101 DPA10202-DPB10501 DPA10202-DPB110601 DPA10202-DPB11801 DPA10202-DPB11901 DPA10202-DPB13101 DPA10202-DPB13801 DPA10202-DPB15501 DPA10202-DPB16501 DPA10301-DPB10101 DPA10301-DPB10201 DPA10301-DPB10401 DPA10301-DPB10402 DPA10301-DPB110501 DPA10301-DPB110601 DPA10301-DPB11101 DPA10301-DPB11301 DPA10301-DPB11801; note = HLAs: DPA10301-DPB12301 DPA10301-DPB13901 DPA10301-DPB14901 DPA10301-DPB15501 DPA10301-DPB16501 DPA10301-DPB17501 DPA10301-DPB18001 DPA10401-DPB10101 DPA10401-DPB10201 DPA10401-DPB10402 DPA10401-DPB10501 DPA10401-DPB110501 DPA10401-DPB14901
KEPPFLWVGIELHPDKWTVQ

SEQ ID NO: 7459 - protein, 20 aa, synthetic construct
  source 1..20: note = Seed: KEPPFLWMGYELHPDKWTVQ; note = HLAs: DRB1_1001 DPA10103-DPB10101 DPA10103-DPB10201 DPA10103-DPB10202 DPA10103-DPB10401 DPA10103-DPB10402 DPA10103-DPB10501 DPA10103-DPB110501 DPA10103-DPB112601 DPA10103-DPB11501 DPA10103-DPB11601 DPA10103-DPB11801 DPA10103-DPB11901 DPA10103-DPB12301 DPA10103-DPB13101 DPA10103-DPB13401 DPA10103-DPB13901 DPA10103-DPB14001 DPA10103-DPB14101 DPA10103-DPB14801 DPA10103-DPB14901 DPA10103-DPB15001 DPA10103-DPB15101 DPA10103-DPB15501 DPA10103-DPB15901 DPA10103-DPB18001 DPA10104-DPB10101 DPA10104-DPB11501 DPA10105-DPB10101 DPA10105-DPB10401 DPA10105-DPB11801 DPA10105-DPB15001 DPA10106-DPB10101 DPA10201-DPB10101 DPA10201-DPB10201 DPA10201-DPB10202 DPA10201-DPB10401 DPA10201-DPB10501 DPA10201-DPB110601 DPA10201-DPB11501 DPA10201-DPB11601 DPA10201-DPB11901 DPA10201-DPB13401 DPA10201-DPB15501 DPA10202-DPB10101 DPA10202-DPB10201 DPA10202-DPB10202 DPA10202-DPB10501 DPA10202-DPB110601 DPA10202-DPB11101 DPA10202-DPB11301 DPA10202-DPB11801 DPA10202-DPB11901 DPA10202-DPB13101 DPA10202-DPB13801; note = HLAs: DPA10202-DPB15501 DPA10202-DPB16501 DPA10301-DPB10101 DPA10301-DPB10201 DPA10301-DPB10202 DPA10301-DPB10401 DPA10301-DPB10402 DPA10301-DPB110501 DPA10301-DPB110601 DPA10301-DPB11101 DPA10301-DPB11301 DPA10301-DPB11801 DPA10301-DPB12301 DPA10301-DPB13901 DPA10301-DPB14001 DPA10301-DPB14901 DPA10301-DPB15501 DPA10301-DPB16501 DPA10301-DPB17501 DPA10301-DPB18001 DPA10401-DPB10101 DPA10401-DPB10201 DPA10401-DPB10202 DPA10401-DPB10402 DPA10401-DPB10501 DPA10401-DPB110501 DPA10401-DPB14901
KEPPFLWIGLELHPDKWTVQ

SEQ ID NO: 7460 - protein, 20 aa, synthetic construct
  source 1..20: note = Seed: KEPPFLWMGYELHPDKWTVQ; note = HLAs: DRB1_0101 DRB1_0405 DRB1_1001 DPA10103-DPB10101 DPA10103-DPB10201 DPA10103-DPB10202 DPA10103-DPB10401 DPA10103-DPB10402 DPA10103-DPB10501 DPA10103-DPB110501 DPA10103-DPB112601 DPA10103-DPB11501 DPA10103-DPB11601 DPA10103-DPB11801 DPA10103-DPB11901 DPA10103-DPB12301 DPA10103-DPB13101 DPA10103-DPB13401 DPA10103-DPB13901 DPA10103-DPB14001 DPA10103-DPB14101 DPA10103-DPB14801 DPA10103-DPB14901 DPA10103-DPB15001 DPA10103-DPB15101 DPA10103-DPB15501 DPA10103-DPB15901 DPA10103-DPB18001 DPA10104-DPB10101 DPA10104-DPB11501 DPA10105-DPB10101 DPA10105-DPB10401 DPA10105-DPB11801 DPA10105-DPB15001 DPA10106-DPB10101 DPA10201-DPB10101 DPA10201-DPB10201 DPA10201-DPB10202 DPA10201-DPB10401 DPA10201-DPB10501 DPA10201-DPB110601 DPA10201-DPB11501 DPA10201-DPB11601 DPA10201-DPB11901 DPA10201-DPB15501 DPA10202-DPB10101 DPA10202-DPB10201 DPA10202-DPB10202 DPA10202-DPB10401 DPA10202-DPB10501 DPA10202-DPB110601 DPA10202-DPB11101 DPA10202-DPB11301 DPA10202-DPB11801 DPA10202-DPB11901 DPA10202-DPB13101; note = HLAs: DPA10202-DPB13801 DPA10202-DPB15501 DPA10202-DPB16501 DPA10301-DPB10101 DPA10301-DPB10201 DPA10301-DPB10202 DPA10301-DPB10401 DPA10301-DPB10402 DPA10301-DPB110501 DPA10301-DPB110601 DPA10301-DPB11101 DPA10301-DPB11301 DPA10301-DPB11801 DPA10301-DPB12301 DPA10301-DPB13901 DPA10301-DPB14001 DPA10301-DPB14901 DPA10301-DPB15501 DPA10301-DPB16501 DPA10301-DPB17501 DPA10301-DPB18001 DPA10401-DPB10101 DPA10401-DPB10201 DPA10401-DPB10202 DPA10401-DPB10402 DPA10401-DPB10501 DPA10401-DPB110501 DPA10401-DPB14901
KEPPFLWMGVELVPDKWTVQ

SEQ ID NO: 7461 - protein, 20 aa, synthetic construct
  source 1..20: note = Seed: KEPPFLWMGYELHPDKWTVQ; note = HLAs: DPA10103-DPB10101 DPA10103-DPB10201 DPA10103-DPB10202 DPA10103-DPB10401 DPA10103-DPB10402 DPA10103-DPB10501 DPA10103-DPB110501 DPA10103-DPB112601 DPA10103-DPB11501 DPA10103-DPB11601 DPA10103-DPB11801 DPA10103-DPB11901 DPA10103-DPB12301 DPA10103-DPB13101 DPA10103-DPB13401 DPA10103-DPB13901 DPA10103-DPB14001 DPA10103-DPB14101 DPA10103-DPB14801 DPA10103-DPB14901 DPA10103-DPB15001 DPA10103-DPB15101 DPA10103-DPB15501 DPA10103-DPB15901 DPA10103-DPB18001 DPA10104-DPB10101 DPA10104-DPB11501 DPA10105-DPB10101 DPA10105-DPB10401 DPA10105-DPB11801 DPA10105-DPB15001 DPA10106-DPB10101 DPA10201-DPB10101 DPA10201-DPB10201 DPA10201-DPB10202 DPA10201-DPB10401 DPA10201-DPB110601 DPA10201-DPB11501 DPA10201-DPB11601 DPA10201-DPB11901 DPA10201-DPB13401 DPA10201-DPB15501 DPA10202-DPB10101 DPA10202-DPB10201 DPA10202-DPB10202 DPA10202-DPB10401 DPA10202-DPB10501 DPA10202-DPB110601 DPA10202-DPB11301 DPA10202-DPB11901 DPA10202-DPB13101 DPA10202-DPB13801 DPA10202-DPB15501 DPA10202-DPB16501 DPA10301-DPB10101; note = HLAs: DPA10301-DPB10201 DPA10301-DPB10202 DPA10301-DPB10401 DPA10301-DPB10402 DPA10301-DPB110501 DPA10301-DPB110601 DPA10301-DPB11101 DPA10301-DPB11301 DPA10301-DPB11801 DPA10301-DPB12301 DPA10301-DPB13901 DPA10301-DPB14001 DPA10301-DPB14901 DPA10301-DPB15501 DPA10301-DPB16501 DPA10301-DPB17501 DPA10301-DPB18001 DPA10401-DPB10101 DPA10401-DPB10201 DPA10401-DPB10202 DPA10401-DPB10402 DPA10401-DPB10501 DPA10401-DPB110501 DPA10401-DPB14901
KEPPWLWSGYELFPDKWTVQ

SEQ ID NO: 7462 - protein, 20 aa, synthetic construct
  source 1..20: note = Seed: KEPPFLWMGYELHPDKWTVQ; note = HLAs: DRB1_0101 DRB1_0405 DRB1_1001 DPA10103-DPB10101 DPA10103-DPB10201 DPA10103-DPB10202 DPA10103-DPB10401 DPA10103-DPB10402 DPA10103-DPB10501 DPA10103-DPB110501 DPA10103-DPB112601 DPA10103-DPB11501 DPA10103-DPB11601 DPA10103-DPB11801 DPA10103-DPB11901 DPA10103-DPB12301 DPA10103-DPB13101 DPA10103-DPB13401 DPA10103-DPB13901 DPA10103-DPB14001 DPA10103-DPB14101 DPA10103-DPB14801 DPA10103-DPB14901 DPA10103-DPB15001 DPA10103-DPB15101 DPA10103-DPB15501 DPA10103-DPB15901 DPA10103-DPB18001 DPA10104-DPB10101 DPA10104-DPB11501 DPA10105-DPB10101 DPA10105-DPB10401 DPA10105-DPB11801 DPA10105-DPB15001 DPA10106-DPB10101 DPA10201-DPB10101 DPA10201-DPB10201 DPA10201-DPB10202 DPA10201-DPB10501 DPA10201-DPB110601 DPA10201-DPB11501 DPA10201-DPB11601 DPA10201-DPB11901 DPA10201-DPB15501 DPA10202-DPB10101 DPA10202-DPB10201 DPA10202-DPB10202 DPA10202-DPB10401 DPA10202-DPB10501 DPA10202-DPB110601 DPA10202-DPB11101 DPA10202-DPB11301 DPA10202-DPB11801 DPA10202-DPB11901 DPA10202-DPB13101 DPA10202-DPB13801; note = HLAs: DPA10202-DPB15501 DPA10202-DPB16501 DPA10301-DPB10101 DPA10301-DPB10201 DPA10301-DPB10202 DPA10301-DPB10401 DPA10301-DPB10402 DPA10301-DPB110501 DPA10301-DPB110601 DPA10301-DPB11101 DPA10301-DPB11301 DPA10301-DPB11801 DPA10301-DPB12301 DPA10301-DPB13901 DPA10301-DPB14001 DPA10301-DPB14901 DPA10301-DPB15501 DPA10301-DPB16501 DPA10301-DPB17501 DPA10301-DPB18001 DPA10401-DPB10101 DPA10401-DPB10201 DPA10401-DPB10202 DPA10401-DPB10402 DPA10401-DPB10501 DPA10401-DPB110501 DPA10401-DPB14901
KEPPFLWAGLELSPDKWTVQ

SEQ ID NO: 7463 - protein, 20 aa, synthetic construct
  source 1..20: note = Seed: KEPPFLWMGYELHPDKWTVQ; note = HLAs: DRB1_0101 DPA10103-DPB10101 DPA10103-DPB10201 DPA10103-DPB10202 DPA10103-DPB10401 DPA10103-DPB10501 DPA10103-DPB112601 DPA10103-DPB11501 DPA10103-DPB11601 DPA10103-DPB11801 DPA10103-DPB11901 DPA10103-DPB12301 DPA10103-DPB13101 DPA10103-DPB13401 DPA10103-DPB13901 DPA10103-DPB14001 DPA10103-DPB14101 DPA10103-DPB14801 DPA10103-DPB15001 DPA10103-DPB15501 DPA10103-DPB15901 DPA10104-DPB10101 DPA10104-DPB11501 DPA10105-DPB10101 DPA10105-DPB10401 DPA10105-DPB11801 DPA10105-DPB15001 DPA10106-DPB10101 DPA10201-DPB10101 DPA10201-DPB10201 DPA10201-DPB10202 DPA10201-DPB10401 DPA10201-DPB10501 DPA10201-DPB110601 DPA10201-DPB11501 DPA10201-DPB11601 DPA10201-DPB11901 DPA10201-DPB13401 DPA10201-DPB15501 DPA10202-DPB10101 DPA10202-DPB10201 DPA10202-DPB10202 DPA10202-DPB10401 DPA10202-DPB10501 DPA10202-DPB110601 DPA10202-DPB11101 DPA10202-DPB11301 DPA10202-DPB11801 DPA10202-DPB11901 DPA10202-DPB13101 DPA10202-DPB13801 DPA10202-DPB15501 DPA10202-DPB16501 DPA10301-DPB10101 DPA10301-DPB10201; note = HLAs: DPA10301-DPB10202 DPA10301-DPB10401 DPA10301-DPB10402 DPA10301-DPB110501 DPA10301-DPB110601 DPA10301-DPB11101 DPA10301-DPB11301 DPA10301-DPB11801 DPA10301-DPB12301 DPA10301-DPB13901 DPA10301-DPB14001 DPA10301-DPB14901 DPA10301-DPB15501 DPA10301-DPB16501 DPA10301-DPB17501 DPA10301-DPB18001 DPA10401-DPB10101 DPA10401-DPB10201 DPA10401-DPB10202 DPA10401-DPB10402 DPA10401-DPB10501 DPA10401-DPB110501 DPA10401-DPB14901
KEPPILWSGLELVPDKWTVQ

SEQ ID NO: 7464 - protein, 20 aa, synthetic construct
  source 1..20: note = Seed: KEPPFLWMGYELHPDKWTVQ; note = HLAs: DPA10103-DPB10101 DPA10103-DPB10201 DPA10103-DPB10202 DPA10103-DPB10401 DPA10103-DPB10402 DPA10103-DPB10501 DPA10103-DPB110501 DPA10103-DPB112601 DPA10103-DPB11501 DPA10103-DPB11601 DPA10103-DPB11801 DPA10103-DPB11901 DPA10103-DPB12301 DPA10103-DPB13101 DPA10103-DPB13401 DPA10103-DPB13901 DPA10103-DPB14001 DPA10103-DPB14101 DPA10103-DPB14801 DPA10103-DPB14901 DPA10103-DPB15101 DPA10103-DPB15501 DPA10103-DPB15901 DPA10103-DPB18001 DPA10104-DPB10101 DPA10104-DPB11501 DPA10105-DPB10101 DPA10105-DPB10401 DPA10105-DPB11801 DPA10106-DPB10101 DPA10201-DPB10101 DPA10201-DPB10201 DPA10201-DPB10202 DPA10201-DPB10401 DPA10201-DPB10501 DPA10201-DPB110601 DPA10201-DPB11501 DPA10201-DPB11601 DPA10201-DPB11901 DPA10201-DPB13401 DPA10201-DPB15501 DPA10202-DPB10101 DPA10202-DPB10201 DPA10202-DPB10202 DPA10202-DPB10401 DPA10202-DPB10501 DPA10202-DPB110601 DPA10202-DPB11301 DPA10202-DPB11801 DPA10202-DPB11901 DPA10202-DPB13101 DPA10202-DPB13801 DPA10202-DPB15501 DPA10202-DPB16501 DPA10301-DPB10101; note = HLAs: DPA10301-DPB10201 DPA10301-DPB10202 DPA10301-DPB10401 DPA10301-DPB10402 DPA10301-DPB110501 DPA10301-DPB110601 DPA10301-DPB11101 DPA10301-DPB12301 DPA10301-DPB13901 DPA10301-DPB14001 DPA10301-DPB14901 DPA10301-DPB16501 DPA10301-DPB17501 DPA10301-DPB18001 DPA10401-DPB10101 DPA10401-DPB10201 DPA10401-DPB10202 DPA10401-DPB10402 DPA10401-DPB10501 DPA10401-DPB110501 DPA10401-DPB14901
KEPPCLWHGFELIPDKWTVQ

SEQ ID NO: 7465 - protein, 14 aa, synthetic construct
  source 1..14: note = Seed: PPFLWMGYELHPDK; note = HLAs: DPA10103-DPB10201 DPA10103-DPB10202 DPA10103-DPB10401 DPA10103-DPB112601 DPA10103-DPB11501 DPA10103-DPB11601 DPA10103-DPB11901 DPA10103-DPB12301 DPA10103-DPB13101 DPA10103-DPB13401 DPA10103-DPB13901 DPA10103-DPB14001 DPA10103-DPB14101 DPA10103-DPB14801 DPA10103-DPB15901 DPA10104-DPB11501 DPA10105-DPB10401 DPA10106-DPB10101 DPA10201-DPB10101 DPA10201-DPB110601 DPA10201-DPB11501 DPA10201-DPB11601 DPA10201-DPB11901 DPA10202-DPB10101 DPA10202-DPB10201 DPA10202-DPB10202 DPA10202-DPB10401 DPA10202-DPB110601 DPA10202-DPB11901 DPA10202-DPB13101 DPA10202-DPB16501 DPA10301-DPB10201 DPA10301-DPB10202 DPA10301-DPB10401 DPA10301-DPB10402 DPA10301-DPB110501 DPA10301-DPB110601 DPA10301-DPB12301 DPA10301-DPB13901 DPA10301-DPB14901 DPA10301-DPB17501 DPA10301-DPB18001 DPA10401-DPB10201 DPA10401-DPB10202 DPA10401-DPB10402 DPA10401-DPB110501 DPA10401-DPB14901
PPFLWRGWELLPDK

SEQ ID NO: 7466 - protein, 20 aa, synthetic construct
  source 1..20: note = Seed: KEPPFLWMGYELHPDKWTVQ; note = HLAs: DPA10103-DPB10201 DPA10103-DPB10202 DPA10103-DPB10401 DPA10103-DPB112601 DPA10103-DPB11501 DPA10103-DPB11601 DPA10103-DPB11801 DPA10103-DPB11901 DPA10103-DPB12301 DPA10103-DPB13401 DPA10103-DPB13901 DPA10103-DPB14001 DPA10103-DPB14101 DPA10103-DPB14801 DPA10103-DPB15501 DPA10103-DPB15901 DPA10104-DPB11501 DPA10105-DPB10401 DPA10105-DPB11801 DPA10201-DPB10201 DPA10201-DPB10202 DPA10201-DPB10401 DPA10201-DPB10501 DPA10201-DPB110601 DPA10201-DPB11501 DPA10201-DPB11601 DPA10201-DPB11901 DPA10201-DPB13401 DPA10202-DPB10201 DPA10202-DPB10202 DPA10202-DPB110601 DPA10202-DPB11801 DPA10202-DPB11901 DPA10301-DPB10201 DPA10301-DPB10202 DPA10301-DPB110601 DPA10301-DPB11801 DPA10301-DPB17501 DPA10401-DPB10201 DPA10401-DPB10202 DPA10401-DPB10402 DPA10401-DPB110501 DPA10401-DPB14901
KEPPFLWRGIELLPDKWTVQ

SEQ ID NO: 7467 - protein, 20 aa, synthetic construct
  source 1..20: note = Seed: KEPPFLWMGYELHPDKWTVQ; note = HLAs: DRB1_0101 DRB1_0405 DRB1_1001 DPA10103-DPB10101 DPA10103-DPB10201 DPA10103-DPB10202 DPA10103-DPB10401 DPA10103-DPB10501 DPA10103-DPB112601 DPA10103-DPB11501 DPA10103-DPB11601 DPA10103-DPB11801 DPA10103-DPB11901 DPA10103-DPB12301 DPA10103-DPB13401 DPA10103-DPB13901 DPA10103-DPB14001 DPA10103-DPB14101 DPA10103-DPB14801 DPA10103-DPB15001 DPA10103-DPB15501 DPA10103-DPB15901 DPA10104-DPB10101 DPA10104-DPB11501 DPA10105-DPB10101 DPA10105-DPB10401 DPA10105-DPB11801 DPA10105-DPB15001 DPA10106-DPB10101 DPA10201-DPB10101 DPA10201-DPB10201 DPA10201-DPB10202 DPA10201-DPB10401 DPA10201-DPB10501 DPA10201-DPB110601 DPA10201-DPB11501 DPA10201-DPB11601 DPA10201-DPB11901 DPA10201-DPB15501 DPA10202-DPB10101 DPA10202-DPB10201 DPA10202-DPB10202 DPA10202-DPB10501 DPA10202-DPB110601 DPA10202-DPB11101 DPA10202-DPB11301 DPA10202-DPB11801 DPA10202-DPB11901 DPA10202-DPB13101 DPA10202-DPB13801 DPA10202-DPB15501 DPA10202-DPB16501 DPA10301-DPB10101 DPA10301-DPB10201 DPA10301-DPB10202 DPA10301-DPB10401; note = HLAs: DPA10301-DPB10402 DPA10301-DPB110501 DPA10301-DPB110601 DPA10301-DPB11101 DPA10301-DPB11301 DPA10301-DPB11801 DPA10301-DPB12301 DPA10301-DPB13901 DPA10301-DPB14001 DPA10301-DPB14901 DPA10301-DPB15501 DPA10301-DPB16501 DPA10301-DPB17501 DPA10301-DPB18001 DPA10401-DPB10101 DPA10401-DPB10201 DPA10401-DPB10202 DPA10401-DPB10402 DPA10401-DPB10501 DPA10401-DPB110501 DPA10401-DPB14901
KEPPFLWVGVELMPDKWTVQ

SEQ ID NO: 7468 - protein, 20 aa, synthetic construct
  source 1..20: note = Seed: KEPPFLWMGYELHPDKWTVQ; note = HLAs: DPA10103-DPB10101 DPA10103-DPB10201 DPA10103-DPB10202 DPA10103-DPB10401 DPA10103-DPB10402 DPA10103-DPB10501 DPA10103-DPB110501 DPA10103-DPB112601 DPA10103-DPB11501 DPA10103-DPB11601 DPA10103-DPB11801 DPA10103-DPB11901 DPA10103-DPB12301 DPA10103-DPB13101 DPA10103-DPB13401 DPA10103-DPB13901 DPA10103-DPB14001 DPA10103-DPB14101 DPA10103-DPB14801 DPA10103-DPB14901 DPA10103-DPB15001 DPA10103-DPB15101 DPA10103-DPB15501 DPA10103-DPB15901 DPA10103-DPB18001 DPA10104-DPB10101 DPA10104-DPB11501 DPA10105-DPB10101 DPA10105-DPB10401 DPA10105-DPB11801 DPA10105-DPB15001 DPA10106-DPB10101 DPA10201-DPB10101 DPA10201-DPB10201 DPA10201-DPB10202 DPA10201-DPB10401 DPA10201-DPB110601 DPA10201-DPB11501 DPA10201-DPB11601 DPA10201-DPB11901 DPA10201-DPB13401 DPA10201-DPB15501 DPA10202-DPB10101 DPA10202-DPB10201 DPA10202-DPB10202 DPA10202-DPB10401 DPA10202-DPB10501 DPA10202-DPB110601 DPA10202-DPB11101 DPA10202-DPB11301 DPA10202-DPB11801 DPA10202-DPB11901 DPA10202-DPB13101 DPA10202-DPB13801 DPA10202-DPB15501; note = HLAs: DPA10202-DPB16501 DPA10301-DPB10101 DPA10301-DPB10201 DPA10301-DPB10202 DPA10301-DPB10401 DPA10301-DPB10402 DPA10301-DPB110501 DPA10301-DPB110601 DPA10301-DPB11101 DPA10301-DPB11301 DPA10301-DPB11801 DPA10301-DPB12301 DPA10301-DPB13901 DPA10301-DPB14001 DPA10301-DPB14901 DPA10301-DPB15501 DPA10301-DPB16501 DPA10301-DPB17501 DPA10301-DPB18001 DPA10401-DPB10101 DPA10401-DPB10201 DPA10401-DPB10202 DPA10401-DPB10402 DPA10401-DPB10501 DPA10401-DPB110501 DPA10401-DPB14901
KEPPFLWGGWELLPDKWTVQ

SEQ ID NO: 7469 - protein, 20 aa, synthetic construct
  source 1..20: note = Seed: KEPPFLWMGYELHPDKWTVQ; note = HLAs: DRB1_0405 DRB1_1001 DPA10103-DPB10101 DPA10103-DPB10201 DPA10103-DPB10202 DPA10103-DPB10401 DPA10103-DPB10501 DPA10103-DPB112601 DPA10103-DPB11501 DPA10103-DPB11601 DPA10103-DPB11801 DPA10103-DPB11901 DPA10103-DPB12301 DPA10103-DPB13901 DPA10103-DPB14001 DPA10103-DPB14101 DPA10103-DPB14801 DPA10103-DPB15001 DPA10103-DPB15501 DPA10103-DPB15901 DPA10104-DPB10101 DPA10104-DPB11501 DPA10105-DPB10101 DPA10105-DPB10401 DPA10105-DPB11801 DPA10105-DPB15001 DPA10106-DPB10101 DPA10201-DPB10101 DPA10201-DPB10401 DPA10201-DPB10501 DPA10201-DPB110601 DPA10201-DPB11501 DPA10201-DPB11901 DPA10201-DPB15501 DPA10202-DPB10101 DPA10202-DPB10202 DPA10202-DPB10501 DPA10202-DPB11101 DPA10202-DPB11801 DPA10202-DPB13801 DPA10202-DPB15501 DPA10202-DPB16501 DPA10301-DPB10101 DPA10301-DPB10201 DPA10301-DPB10202 DPA10301-DPB10401 DPA10301-DPB10402 DPA10301-DPB110501 DPA10301-DPB110601 DPA10301-DPB11101 DPA10301-DPB11301 DPA10301-DPB11801 DPA10301-DPB12301 DPA10301-DPB13901 DPA10301-DPB14001; note = HLAs: DPA10301-DPB14901 DPA10301-DPB15501 DPA10301-DPB16501 DPA10301-DPB17501 DPA10301-DPB18001 DPA10401-DPB10101 DPA10401-DPB10201 DPA10401-DPB10202 DPA10401-DPB10402 DPA10401-DPB10501 DPA10401-DPB110501 DPA10401-DPB14901
KEPPFLWVGIELEPDKWTVQ

SEQ ID NO: 7470 - protein, 20 aa, synthetic construct
  source 1..20: note = Seed: KEPPFLWMGYELHPDKWTVQ; note = HLAs: DPA10103-DPB10101 DPA10103-DPB10201 DPA10103-DPB10202 DPA10103-DPB10401 DPA10103-DPB10402 DPA10103-DPB10501 DPA10103-DPB110501 DPA10103-DPB112601 DPA10103-DPB11501 DPA10103-DPB11601 DPA10103-DPB11801 DPA10103-DPB11901 DPA10103-DPB12301 DPA10103-DPB13101 DPA10103-DPB13401 DPA10103-DPB13901 DPA10103-DPB14001 DPA10103-DPB14101 DPA10103-DPB14801 DPA10103-DPB14901 DPA10103-DPB15001 DPA10103-DPB15101 DPA10103-DPB15501 DPA10103-DPB15901 DPA10103-DPB18001 DPA10104-DPB10101 DPA10104-DPB11501 DPA10105-DPB10101 DPA10105-DPB10401 DPA10105-DPB11801 DPA10105-DPB15001 DPA10106-DPB10101 DPA10201-DPB10101 DPA10201-DPB10201 DPA10201-DPB10202 DPA10201-DPB10401 DPA10201-DPB10501 DPA10201-DPB110601 DPA10201-DPB11501 DPA10201-DPB11601 DPA10201-DPB11901 DPA10201-DPB13401 DPA10201-DPB15501 DPA10202-DPB10101 DPA10202-DPB10201 DPA10202-DPB10202 DPA10202-DPB10401 DPA10202-DPB10501 DPA10202-DPB110601 DPA10202-DPB11101 DPA10202-DPB11301 DPA10202-DPB11801 DPA10202-DPB11901 DPA10202-DPB13101 DPA10202-DPB13801; note = HLAs: DPA10202-DPB15501 DPA10202-DPB16501 DPA10301-DPB10101 DPA10301-DPB10201 DPA10301-DPB10202 DPA10301-DPB10402 DPA10301-DPB110501 DPA10301-DPB110601 DPA10301-DPB11101 DPA10301-DPB11301 DPA10301-DPB14001 DPA10301-DPB14901 DPA10301-DPB15501 DPA10301-DPB16501 DPA10301-DPB17501 DPA10301-DPB18001 DPA10401-DPB10101 DPA10401-DPB10201 DPA10401-DPB10202 DPA10401-DPB10402 DPA10401-DPB10501 DPA10401-DPB110501 DPA10401-DPB14901
KEPPKLWTGFELIPDKWTVQ

SEQ ID NO: 7471 - protein, 14 aa, synthetic construct
  source 1..14: note = Seed: PPFLWMGYELHPDK; note = HLAs: DRB1_1001 DPA10103-DPB10101 DPA10103-DPB10201 DPA10103-DPB10202 DPA10103-DPB10401 DPA10103-DPB112601 DPA10103-DPB11501 DPA10103-DPB11601 DPA10103-DPB11901 DPA10103-DPB12301 DPA10103-DPB13101 DPA10103-DPB13401 DPA10103-DPB13901 DPA10103-DPB14001 DPA10103-DPB14101 DPA10103-DPB14801 DPA10103-DPB15001 DPA10103-DPB15901 DPA10104-DPB10101 DPA10104-DPB11501 DPA10105-DPB10101 DPA10105-DPB10401 DPA10105-DPB15001 DPA10106-DPB10101 DPA10201-DPB10101 DPA10201-DPB110601 DPA10201-DPB11501 DPA10201-DPB11601 DPA10201-DPB11901 DPA10202-DPB10101 DPA10202-DPB10201 DPA10202-DPB10202 DPA10202-DPB110601 DPA10202-DPB11901 DPA10202-DPB13101 DPA10202-DPB16501 DPA10301-DPB10101 DPA10301-DPB10201 DPA10301-DPB10202 DPA10301-DPB10401 DPA10301-DPB10402 DPA10301-DPB110501 DPA10301-DPB110601 DPA10301-DPB11801 DPA10301-DPB12301 DPA10301-DPB13901 DPA10301-DPB14001 DPA10301-DPB14901 DPA10301-DPB15501 DPA10301-DPB16501 DPA10301-DPB17501 DPA10301-DPB18001 DPA10401-DPB10101 DPA10401-DPB10201 DPA10401-DPB10202; note = HLAs: DPA10401-DPB10402 DPA10401-DPB10501 DPA10401-DPB110501 DPA10401-DPB14901
PPFLWIGIELTPDK

SEQ ID NO: 7472 - protein, 14 aa, synthetic construct
  source 1..14: note = Seed: PPFLWMGYELHPDK; note = HLAs: DRB1_1001 DPA10103-DPB11501 DPA10103-DPB13401 DPA10103-DPB15901 DPA10104-DPB11501 DPA10201-DPB11501 DPA10202-DPB10101 DPA10202-DPB10201 DPA10202-DPB10202 DPA10202-DPB10401 DPA10202-DPB110601 DPA10202-DPB11901 DPA10202-DPB13101 DPA10202-DPB16501 DPA10301-DPB10201 DPA10301-DPB10202 DPA10301-DPB10402 DPA10301-DPB110501 DPA10301-DPB11801 DPA10301-DPB14001 DPA10301-DPB14901 DPA10301-DPB17501 DPA10301-DPB18001 DPA10401-DPB10402 DPA10401-DPB110501 DPA10401-DPB14901
PPFLWMGTELLPDK

SEQ ID NO: 7473 - protein, 20 aa, synthetic construct
  source 1..20: note = Seed: KEPPFLWMGYELHPDKWTVQ; note = HLAs: DRB1_0101 DPA10103-DPB10101 DPA10103-DPB10201 DPA10103-DPB10202 DPA10103-DPB10401 DPA10103-DPB10501 DPA10103-DPB112601 DPA10103-DPB11501 DPA10103-DPB11601 DPA10103-DPB11801 DPA10103-DPB11901 DPA10103-DPB12301 DPA10103-DPB13101 DPA10103-DPB13401 DPA10103-DPB13901 DPA10103-DPB14001 DPA10103-DPB14101 DPA10103-DPB14801 DPA10103-DPB15001 DPA10103-DPB15501 DPA10103-DPB15901 DPA10104-DPB10101 DPA10104-DPB11501 DPA10105-DPB10101 DPA10105-DPB10401 DPA10105-DPB11801 DPA10105-DPB15001 DPA10106-DPB10101 DPA10201-DPB10101 DPA10201-DPB10201 DPA10201-DPB10202 DPA10201-DPB10501 DPA10201-DPB110601 DPA10201-DPB11501 DPA10201-DPB11601 DPA10201-DPB11901 DPA10201-DPB13401 DPA10201-DPB15501 DPA10202-DPB10101 DPA10202-DPB10201 DPA10202-DPB10202 DPA10202-DPB10401 DPA10202-DPB10501 DPA10202-DPB110601 DPA10202-DPB11301 DPA10202-DPB11801 DPA10202-DPB11901 DPA10202-DPB13101 DPA10202-DPB13801 DPA10202-DPB15501 DPA10202-DPB16501 DPA10301-DPB10101 DPA10301-DPB10201 DPA10301-DPB10202 DPA10301-DPB10401; note = HLAs: DPA10301-DPB10402 DPA10301-DPB110501 DPA10301-DPB110601 DPA10301-DPB11301 DPA10301-DPB11801 DPA10301-DPB12301 DPA10301-DPB13901 DPA10301-DPB14001 DPA10301-DPB14901 DPA10301-DPB15501 DPA10301-DPB16501 DPA10301-DPB17501 DPA10301-DPB18001 DPA10401-DPB10101 DPA10401-DPB10201 DPA10401-DPB10202 DPA10401-DPB10402 DPA10401-DPB10501 DPA10401-DPB110501 DPA10401-DPB14901
KEPPLLWHGIELIPDKWTVQ

SEQ ID NO: 7474 - protein, 20 aa, synthetic construct
  source 1..20: note = Seed: KEPPFLWMGYELHPDKWTVQ; note = HLAs: DPA10103-DPB10101 DPA10103-DPB10201 DPA10103-DPB10202 DPA10103-DPB10401 DPA10103-DPB10402 DPA10103-DPB10501 DPA10103-DPB110501 DPA10103-DPB112601 DPA10103-DPB11501 DPA10103-DPB11601 DPA10103-DPB11801 DPA10103-DPB11901 DPA10103-DPB12301 DPA10103-DPB13101 DPA10103-DPB13401 DPA10103-DPB13901 DPA10103-DPB14001 DPA10103-DPB14101 DPA10103-DPB14801 DPA10103-DPB14901 DPA10103-DPB15001 DPA10103-DPB15101 DPA10103-DPB15501 DPA10103-DPB15901 DPA10103-DPB18001 DPA10104-DPB10101 DPA10104-DPB11501 DPA10105-DPB10101 DPA10105-DPB10401 DPA10105-DPB11801 DPA10105-DPB15001 DPA10106-DPB10101 DPA10201-DPB10101 DPA10201-DPB10201 DPA10201-DPB10202 DPA10201-DPB10401 DPA10201-DPB110601 DPA10201-DPB11501 DPA10201-DPB11601 DPA10201-DPB11901 DPA10201-DPB13401 DPA10201-DPB15501 DPA10202-DPB10101 DPA10202-DPB10201 DPA10202-DPB10202 DPA10202-DPB10401 DPA10202-DPB110601 DPA10202-DPB11301 DPA10202-DPB11901 DPA10202-DPB13101 DPA10202-DPB15501 DPA10202-DPB16501 DPA10301-DPB10101 DPA10301-DPB10201 DPA10301-DPB10202; note = HLAs: DPA10301-DPB10401 DPA10301-DPB10402 DPA10301-DPB110501 DPA10301-DPB110601 DPA10301-DPB11101 DPA10301-DPB11301 DPA10301-DPB11801 DPA10301-DPB12301 DPA10301-DPB13901 DPA10301-DPB14001 DPA10301-DPB14901 DPA10301-DPB15501 DPA10301-DPB16501 DPA10301-DPB17501 DPA10301-DPB18001 DPA10401-DPB10101 DPA10401-DPB10201 DPA10401-DPB10202 DPA10401-DPB10402 DPA10401-DPB10501 DPA10401-DPB110501 DPA10401-DPB14901
KEPPWLWSGYELMPDKWTVQ

SEQ ID NO: 7475 - protein, 20 aa, synthetic construct
  source 1..20: note = Seed: KEPPFLWMGYELHPDKWTVQ; note = HLAs: DRB1_0101 DRB1_1001 DPA10103-DPB10101 DPA10103-DPB10201 DPA10103-DPB10202 DPA10103-DPB10401 DPA10103-DPB10402 DPA10103-DPB10501 DPA10103-DPB110501 DPA10103-DPB112601 DPA10103-DPB11501 DPA10103-DPB11601 DPA10103-DPB11801 DPA10103-DPB11901 DPA10103-DPB12301 DPA10103-DPB13101 DPA10103-DPB13401 DPA10103-DPB13901 DPA10103-DPB14001 DPA10103-DPB14801 DPA10103-DPB14901 DPA10103-DPB15001 DPA10103-DPB15101 DPA10103-DPB15501 DPA10103-DPB15901 DPA10103-DPB18001 DPA10104-DPB10101 DPA10104-DPB11501 DPA10105-DPB10101 DPA10105-DPB10401 DPA10105-DPB11801 DPA10105-DPB15001 DPA10106-DPB10101 DPA10201-DPB10101 DPA10201-DPB10201 DPA10201-DPB10202 DPA10201-DPB10501 DPA10201-DPB110601 DPA10201-DPB11501 DPA10201-DPB11601 DPA10201-DPB11901 DPA10201-DPB13401 DPA10202-DPB10101 DPA10202-DPB10202 DPA10202-DPB10501 DPA10202-DPB110601 DPA10202-DPB11101 DPA10202-DPB11801 DPA10202-DPB11901 DPA10202-DPB13101 DPA10202-DPB13801 DPA10202-DPB16501 DPA10301-DPB10101 DPA10301-DPB10201 DPA10301-DPB10202; note = HLAs: DPA10301-DPB10401 DPA10301-DPB10402 DPA10301-DPB110501 DPA10301-DPB110601 DPA10301-DPB11101 DPA10301-DPB11301 DPA10301-DPB11801 DPA10301-DPB12301 DPA10301-DPB13901 DPA10301-DPB14001 DPA10301-DPB14901 DPA10301-DPB15501 DPA10301-DPB16501 DPA10301-DPB17501 DPA10301-DPB18001 DPA10401-DPB10101 DPA10401-DPB10201 DPA10401-DPB10202 DPA10401-DPB10402 DPA10401-DPB10501 DPA10401-DPB110501 DPA10401-DPB14901
KEPPFLWIGIELRPDKWTVQ

SEQ ID NO: 7476 - protein, 20 aa, synthetic construct
  source 1..20: note = Seed: KEPPFLWMGYELHPDKWTVQ; note = HLAs: DRB1_0101 DRB1_1001 DPA10103-DPB10202 DPA10103-DPB11501 DPA10103-DPB11801 DPA10103-DPB13401 DPA10103-DPB14001 DPA10104-DPB11501 DPA10105-DPB11801 DPA10106-DPB10101 DPA10201-DPB10101 DPA10201-DPB10202 DPA10201-DPB10401 DPA10201-DPB110601 DPA10201-DPB11501 DPA10201-DPB11601 DPA10201-DPB11901 DPA10202-DPB10101 DPA10202-DPB10201 DPA10202-DPB10202 DPA10202-DPB10401 DPA10202-DPB10501 DPA10202-DPB110601 DPA10202-DPB11801 DPA10202-DPB11901 DPA10202-DPB13801 DPA10301-DPB10201 DPA10301-DPB10202 DPA10301-DPB10401 DPA10301-DPB10402 DPA10301-DPB110501 DPA10301-DPB110601 DPA10301-DPB11801 DPA10301-DPB12301 DPA10301-DPB13901 DPA10301-DPB14001 DPA10301-DPB14901 DPA10301-DPB16501 DPA10301-DPB17501 DPA10301-DPB18001 DPA10401-DPB10202 DPA10401-DPB10402 DPA10401-DPB110501 DPA10401-DPB14901
KEPPILWLGIELLPDKWTVQ

SEQ ID NO: 7477 - protein, 20 aa, synthetic construct
  source 1..20: note = Seed: KEPPFLWMGYELHPDKWTVQ; note = HLAs: DPA10103-DPB10101 DPA10103-DPB10201 DPA10103-DPB10202 DPA10103-DPB10401 DPA10103-DPB10402 DPA10103-DPB10501 DPA10103-DPB110501 DPA10103-DPB112601 DPA10103-DPB11501 DPA10103-DPB11601 DPA10103-DPB11801 DPA10103-DPB11901 DPA10103-DPB12301 DPA10103-DPB13101 DPA10103-DPB13401 DPA10103-DPB13901 DPA10103-DPB14001 DPA10103-DPB14101 DPA10103-DPB14801 DPA10103-DPB14901 DPA10103-DPB15001 DPA10103-DPB15101 DPA10103-DPB15501 DPA10103-DPB15901 DPA10103-DPB18001 DPA10104-DPB10101 DPA10104-DPB11501 DPA10105-DPB10101 DPA10105-DPB10401 DPA10105-DPB11801 DPA10105-DPB15001 DPA10106-DPB10101 DPA10201-DPB10101 DPA10201-DPB10201 DPA10201-DPB10202 DPA10201-DPB10401 DPA10201-DPB10501 DPA10201-DPB110601 DPA10201-DPB11501 DPA10201-DPB11601 DPA10201-DPB11901 DPA10201-DPB13401 DPA10201-DPB15501 DPA10202-DPB10101 DPA10202-DPB10201 DPA10202-DPB10202 DPA10202-DPB10401 DPA10202-DPB10501 DPA10202-DPB110601 DPA10202-DPB11101 DPA10202-DPB11301 DPA10202-DPB11801 DPA10202-DPB11901 DPA10202-DPB13101 DPA10202-DPB13801; note = HLAs: DPA10202-DPB15501 DPA10202-DPB16501 DPA10301-DPB10101 DPA10301-DPB10201 DPA10301-DPB10202 DPA10301-DPB10401 DPA10301-DPB10402 DPA10301-DPB110501 DPA10301-DPB110601 DPA10301-DPB11301 DPA10301-DPB11801 DPA10301-DPB12301 DPA10301-DPB13901 DPA10301-DPB14001 DPA10301-DPB14901 DPA10301-DPB15501 DPA10301-DPB16501 DPA10301-DPB17501 DPA10301-DPB18001 DPA10401-DPB10101 DPA10401-DPB10201 DPA10401-DPB10202 DPA10401-DPB10402 DPA10401-DPB10501 DPA10401-DPB110501 DPA10401-DPB14901
KEPPLLWHGFELEPDKWTVQ

SEQ ID NO: 7478 - protein, 20 aa, synthetic construct
  source 1..20: note = Seed: KEPPFLWMGYELHPDKWTVQ; note = HLAs: DPA10103-DPB10101 DPA10103-DPB10201 DPA10103-DPB10202 DPA10103-DPB10401 DPA10103-DPB10402 DPA10103-DPB10501 DPA10103-DPB110501 DPA10103-DPB112601 DPA10103-DPB11501 DPA10103-DPB11601 DPA10103-DPB11801 DPA10103-DPB11901 DPA10103-DPB12301 DPA10103-DPB13101 DPA10103-DPB13401 DPA10103-DPB13901 DPA10103-DPB14001 DPA10103-DPB14101 DPA10103-DPB14801 DPA10103-DPB14901 DPA10103-DPB15001 DPA10103-DPB15101 DPA10103-DPB15501 DPA10103-DPB15901 DPA10103-DPB18001 DPA10104-DPB10101 DPA10104-DPB11501 DPA10105-DPB10101 DPA10105-DPB10401 DPA10105-DPB11801 DPA10105-DPB15001 DPA10106-DPB10101 DPA10201-DPB10101 DPA10201-DPB10201 DPA10201-DPB10202 DPA10201-DPB10401 DPA10201-DPB10501 DPA10201-DPB110601 DPA10201-DPB11501 DPA10201-DPB11601 DPA10201-DPB11901 DPA10201-DPB13401 DPA10202-DPB10101 DPA10202-DPB10201 DPA10202-DPB10202 DPA10202-DPB10401 DPA10202-DPB10501 DPA10202-DPB110601 DPA10202-DPB11301 DPA10202-DPB11801 DPA10202-DPB11901 DPA10202-DPB13101 DPA10202-DPB13801 DPA10202-DPB15501 DPA10202-DPB16501; note = HLAs: DPA10301-DPB10101 DPA10301-DPB10201 DPA10301-DPB10202 DPA10301-DPB10401 DPA10301-DPB10402 DPA10301-DPB110501 DPA10301-DPB110601 DPA10301-DPB11101 DPA10301-DPB11301 DPA10301-DPB11801 DPA10301-DPB12301 DPA10301-DPB13901 DPA10301-DPB14001 DPA10301-DPB14901 DPA10301-DPB16501 DPA10301-DPB17501 DPA10301-DPB18001 DPA10401-DPB10101 DPA10401-DPB10201 DPA10401-DPB10202 DPA10401-DPB10402 DPA10401-DPB10501 DPA10401-DPB110501 DPA10401-DPB14901
KEPPFLWEGMELFPDKWTVQ

SEQ ID NO: 7479 - protein, 20 aa, synthetic construct
  source 1..20: note = Seed: KEPPFLWMGYELHPDKWTVQ; note = HLAs: DRB1_0101 DRB1_1001 DPA10103-DPB10101 DPA10103-DPB10201 DPA10103-DPB10202 DPA10103-DPB10401 DPA10103-DPB10402 DPA10103-DPB10501 DPA10103-DPB110501 DPA10103-DPB112601 DPA10103-DPB11501 DPA10103-DPB11601 DPA10103-DPB11801 DPA10103-DPB11901 DPA10103-DPB12301 DPA10103-DPB13101 DPA10103-DPB13401 DPA10103-DPB13901 DPA10103-DPB14001 DPA10103-DPB14101 DPA10103-DPB14801 DPA10103-DPB14901 DPA10103-DPB15001 DPA10103-DPB15101 DPA10103-DPB15501 DPA10103-DPB15901 DPA10103-DPB18001 DPA10104-DPB10101 DPA10104-DPB11501 DPA10105-DPB10101 DPA10105-DPB10401 DPA10105-DPB11801 DPA10105-DPB15001 DPA10106-DPB10101 DPA10201-DPB10101 DPA10201-DPB10201 DPA10201-DPB10202 DPA10201-DPB10401 DPA10201-DPB10501 DPA10201-DPB110601 DPA10201-DPB11501 DPA10201-DPB11601 DPA10201-DPB11901 DPA10201-DPB15501 DPA10202-DPB10101 DPA10202-DPB10201 DPA10202-DPB10202 DPA10202-DPB10401 DPA10202-DPB10501 DPA10202-DPB110601 DPA10202-DPB11101 DPA10202-DPB11301 DPA10202-DPB11801 DPA10202-DPB11901 DPA10202-DPB13101; note = HLAs: DPA10202-DPB13801 DPA10202-DPB15501 DPA10202-DPB16501 DPA10301-DPB10101 DPA10301-DPB10201 DPA10301-DPB10202 DPA10301-DPB10401 DPA10301-DPB10402 DPA10301-DPB110501 DPA10301-DPB110601 DPA10301-DPB11101 DPA10301-DPB11301 DPA10301-DPB11801 DPA10301-DPB12301 DPA10301-DPB13901 DPA10301-DPB14001 DPA10301-DPB14901 DPA10301-DPB15501 DPA10301-DPB16501 DPA10301-DPB17501 DPA10301-DPB18001 DPA10401-DPB10101 DPA10401-DPB10201 DPA10401-DPB10202 DPA10401-DPB10402 DPA10401-DPB10501 DPA10401-DPB110501 DPA10401-DPB14901
KEPPYLWIGIELVPDKWTVQ

SEQ ID NO: 7480 - protein, 20 aa, synthetic construct
  source 1..20: note = Seed: KEPPFLWMGYELHPDKWTVQ; note = HLAs: DRB1_0101 DRB1_0405 DRB1_1001 DPA10103-DPB10101 DPA10103-DPB10201 DPA10103-DPB10202 DPA10103-DPB10401 DPA10103-DPB10402 DPA10103-DPB10501 DPA10103-DPB110501 DPA10103-DPB112601 DPA10103-DPB11501 DPA10103-DPB11601 DPA10103-DPB11801 DPA10103-DPB11901 DPA10103-DPB12301 DPA10103-DPB13101 DPA10103-DPB13401 DPA10103-DPB13901 DPA10103-DPB14001 DPA10103-DPB14101 DPA10103-DPB14801 DPA10103-DPB14901 DPA10103-DPB15001 DPA10103-DPB15101 DPA10103-DPB15501 DPA10103-DPB15901 DPA10103-DPB18001 DPA10104-DPB10101 DPA10104-DPB11501 DPA10105-DPB10101 DPA10105-DPB10401 DPA10105-DPB11801 DPA10105-DPB15001 DPA10106-DPB10101 DPA10201-DPB10101 DPA10201-DPB10201 DPA10201-DPB10202 DPA10201-DPB10401 DPA10201-DPB10501 DPA10201-DPB110601 DPA10201-DPB11501 DPA10201-DPB11601 DPA10201-DPB11901 DPA10201-DPB13401 DPA10201-DPB15501 DPA10202-DPB10101 DPA10202-DPB10201 DPA10202-DPB10202 DPA10202-DPB10401 DPA10202-DPB10501 DPA10202-DPB110601 DPA10202-DPB11101 DPA10202-DPB11301 DPA10202-DPB11801 DPA10202-DPB11901; note = HLAs: DPA10202-DPB13101 DPA10202-DPB13801 DPA10202-DPB15501 DPA10202-DPB16501 DPA10301-DPB10101 DPA10301-DPB10201 DPA10301-DPB10202 DPA10301-DPB10401 DPA10301-DPB10402 DPA10301-DPB110501 DPA10301-DPB110601 DPA10301-DPB11101 DPA10301-DPB11301 DPA10301-DPB11801 DPA10301-DPB12301 DPA10301-DPB13901 DPA10301-DPB14001 DPA10301-DPB14901 DPA10301-DPB15501 DPA10301-DPB16501 DPA10301-DPB17501 DPA10301-DPB18001 DPA10401-DPB10101 DPA10401-DPB10201 DPA10401-DPB10202 DPA10401-DPB10402 DPA10401-DPB10501 DPA10401-DPB110501 DPA10401-DPB14901
KEPPFLWDGIELLPDKWTVQ

SEQ ID NO: 7481 - protein, 14 aa, synthetic construct
  source 1..14: note = Seed: PPFLWMGYELHPDK; note = HLAs: DRB1_1001 DPA10103-DPB10201 DPA10103-DPB10202 DPA10103-DPB10401 DPA10103-DPB112601 DPA10103-DPB11501 DPA10103-DPB11601 DPA10103-DPB11901 DPA10103-DPB12301 DPA10103-DPB13401 DPA10103-DPB13901 DPA10103-DPB14001 DPA10103-DPB14101 DPA10103-DPB14801 DPA10103-DPB15001 DPA10103-DPB15901 DPA10104-DPB11501 DPA10105-DPB10401 DPA10105-DPB15001 DPA10106-DPB10101 DPA10201-DPB10101 DPA10201-DPB110601 DPA10201-DPB11501 DPA10201-DPB11601 DPA10201-DPB11901 DPA10202-DPB10101 DPA10202-DPB10201 DPA10202-DPB10202 DPA10202-DPB10401 DPA10202-DPB110601 DPA10202-DPB11901 DPA10202-DPB13101 DPA10202-DPB16501 DPA10301-DPB10101 DPA10301-DPB10201 DPA10301-DPB10202 DPA10301-DPB10401 DPA10301-DPB10402 DPA10301-DPB110501 DPA10301-DPB110601 DPA10301-DPB11801 DPA10301-DPB12301 DPA10301-DPB13901 DPA10301-DPB14001 DPA10301-DPB14901 DPA10301-DPB15501 DPA10301-DPB16501 DPA10301-DPB17501 DPA10301-DPB18001 DPA10401-DPB10201 DPA10401-DPB10202 DPA10401-DPB10402 DPA10401-DPB10501 DPA10401-DPB110501 DPA10401-DPB14901
PPFLWAGAELLPDK

SEQ ID NO: 7482 - protein, 20 aa, synthetic construct
  source 1..20: note = Seed: KEPPFLWMGYELHPDKWTVQ; note = HLAs: DRB1_0101 DRB1_0405 DRB1_1001 DPA10103-DPB10101 DPA10103-DPB10201 DPA10103-DPB10202 DPA10103-DPB10401 DPA10103-DPB10402 DPA10103-DPB10501 DPA10103-DPB110501 DPA10103-DPB112601 DPA10103-DPB11501 DPA10103-DPB11601 DPA10103-DPB11801 DPA10103-DPB11901 DPA10103-DPB12301 DPA10103-DPB13101 DPA10103-DPB13401 DPA10103-DPB13901 DPA10103-DPB14001 DPA10103-DPB14101 DPA10103-DPB14801 DPA10103-DPB14901 DPA10103-DPB15001 DPA10103-DPB15101 DPA10103-DPB15501 DPA10103-DPB15901 DPA10103-DPB18001 DPA10104-DPB10101 DPA10104-DPB11501 DPA10105-DPB10101 DPA10105-DPB10401 DPA10105-DPB11801 DPA10105-DPB15001 DPA10106-DPB10101 DPA10201-DPB10101 DPA10201-DPB10201 DPA10201-DPB10202 DPA10201-DPB10401 DPA10201-DPB110601 DPA10201-DPB11501 DPA10201-DPB11601 DPA10201-DPB11901 DPA10201-DPB15501 DPA10202-DPB10101 DPA10202-DPB10201 DPA10202-DPB10202 DPA10202-DPB10401 DPA10202-DPB10501 DPA10202-DPB110601 DPA10202-DPB11101 DPA10202-DPB11301 DPA10202-DPB11801 DPA10202-DPB11901 DPA10202-DPB13101 DPA10202-DPB13801; note = HLAs: DPA10202-DPB15501 DPA10202-DPB16501 DPA10301-DPB10101 DPA10301-DPB10201 DPA10301-DPB10202 DPA10301-DPB10401 DPA10301-DPB10402 DPA10301-DPB110501 DPA10301-DPB110601 DPA10301-DPB11101 DPA10301-DPB11301 DPA10301-DPB11801 DPA10301-DPB12301 DPA10301-DPB13901 DPA10301-DPB14001 DPA10301-DPB14901 DPA10301-DPB15501 DPA10301-DPB16501 DPA10301-DPB17501 DPA10301-DPB18001 DPA10401-DPB10101 DPA10401-DPB10201 DPA10401-DPB10202 DPA10401-DPB10402 DPA10401-DPB10501 DPA10401-DPB110501 DPA10401-DPB14901
KEPPFLWNGVELIPDKWTVQ

SEQ ID NO: 7483 - protein, 20 aa, synthetic construct
  source 1..20: note = Seed: KEPPFLWMGYELHPDKWTVQ; note = HLAs: DRB1_0101 DPA10103-DPB10101 DPA10103-DPB10201 DPA10103-DPB10202 DPA10103-DPB10401 DPA10103-DPB10402 DPA10103-DPB10501 DPA10103-DPB110501 DPA10103-DPB112601 DPA10103-DPB11501 DPA10103-DPB11601 DPA10103-DPB11801 DPA10103-DPB11901 DPA10103-DPB12301 DPA10103-DPB13101 DPA10103-DPB13401 DPA10103-DPB13901 DPA10103-DPB14001 DPA10103-DPB14101 DPA10103-DPB14801 DPA10103-DPB14901 DPA10103-DPB15001 DPA10103-DPB15101 DPA10103-DPB15501 DPA10103-DPB15901 DPA10103-DPB18001 DPA10104-DPB10101 DPA10104-DPB11501 DPA10105-DPB10101 DPA10105-DPB10401 DPA10105-DPB11801 DPA10105-DPB15001 DPA10106-DPB10101 DPA10201-DPB10101 DPA10201-DPB10201 DPA10201-DPB10202 DPA10201-DPB10401 DPA10201-DPB10501 DPA10201-DPB110601 DPA10201-DPB11501 DPA10201-DPB11601 DPA10201-DPB11901 DPA10201-DPB13401 DPA10201-DPB15501 DPA10202-DPB10101 DPA10202-DPB10201 DPA10202-DPB10202 DPA10202-DPB10401 DPA10202-DPB10501 DPA10202-DPB110601 DPA10202-DPB11101 DPA10202-DPB11301 DPA10202-DPB11801 DPA10202-DPB11901 DPA10202-DPB13101; note = HLAs: DPA10202-DPB13801 DPA10202-DPB15501 DPA10202-DPB16501 DPA10301-DPB10101 DPA10301-DPB10201 DPA10301-DPB10202 DPA10301-DPB10401 DPA10301-DPB10402 DPA10301-DPB110501 DPA10301-DPB110601 DPA10301-DPB11101 DPA10301-DPB11301 DPA10301-DPB11801 DPA10301-DPB12301 DPA10301-DPB13901 DPA10301-DPB14001 DPA10301-DPB14901 DPA10301-DPB15501 DPA10301-DPB16501 DPA10301-DPB17501 DPA10301-DPB18001 DPA10401-DPB10101 DPA10401-DPB10201 DPA10401-DPB10202 DPA10401-DPB10402 DPA10401-DPB10501 DPA10401-DPB110501 DPA10401-DPB14901
KEPPLLWIGWELVPDKWTVQ

SEQ ID NO: 7484 - protein, 20 aa, synthetic construct
  source 1..20: note = Seed: KEPPFLWMGYELHPDKWTVQ; note = HLAs: DRB1_0405 DRB1_1001 DPA10103-DPB10101 DPA10103-DPB10201 DPA10103-DPB10202 DPA10103-DPB10401 DPA10103-DPB10501 DPA10103-DPB112601 DPA10103-DPB11501 DPA10103-DPB11601 DPA10103-DPB11801 DPA10103-DPB11901 DPA10103-DPB12301 DPA10103-DPB13101 DPA10103-DPB13401 DPA10103-DPB13901 DPA10103-DPB14001 DPA10103-DPB14101 DPA10103-DPB14801 DPA10103-DPB15001 DPA10103-DPB15501 DPA10103-DPB15901 DPA10104-DPB10101 DPA10104-DPB11501 DPA10105-DPB10101 DPA10105-DPB10401 DPA10105-DPB11801 DPA10105-DPB15001 DPA10106-DPB10101 DPA10201-DPB10101 DPA10201-DPB10201 DPA10201-DPB10202 DPA10201-DPB10401 DPA10201-DPB10501 DPA10201-DPB110601 DPA10201-DPB11501 DPA10201-DPB11601 DPA10201-DPB11901 DPA10201-DPB13401 DPA10201-DPB15501 DPA10202-DPB10101 DPA10202-DPB10201 DPA10202-DPB10202 DPA10202-DPB10401 DPA10202-DPB10501 DPA10202-DPB110601 DPA10202-DPB11101 DPA10202-DPB11301 DPA10202-DPB11801 DPA10202-DPB11901 DPA10202-DPB13101 DPA10202-DPB13801 DPA10202-DPB15501 DPA10202-DPB16501 DPA10301-DPB10101; note = HLAs: DPA10301-DPB10201 DPA10301-DPB10202 DPA10301-DPB10401 DPA10301-DPB10402 DPA10301-DPB110501 DPA10301-DPB110601 DPA10301-DPB11101 DPA10301-DPB11301 DPA10301-DPB11801 DPA10301-DPB12301 DPA10301-DPB13901 DPA10301-DPB14001 DPA10301-DPB14901 DPA10301-DPB15501 DPA10301-DPB16501 DPA10301-DPB17501 DPA10301-DPB18001 DPA10401-DPB10101 DPA10401-DPB10201 DPA10401-DPB10202 DPA10401-DPB10402 DPA10401-DPB10501 DPA10401-DPB110501 DPA10401-DPB14901
KEPPFLWTGLELEPDKWTVQ

SEQ ID NO: 7485 - protein, 20 aa, synthetic construct
  source 1..20: note = Seed: KEPPFLWMGYELHPDKWTVQ; note = HLAs: DRB1_0101 DRB1_0405 DRB1_1001 DPA10103-DPB10201 DPA10103-DPB10202 DPA10103-DPB10401 DPA10103-DPB112601 DPA10103-DPB11501 DPA10103-DPB12301 DPA10103-DPB13401 DPA10103-DPB13901 DPA10103-DPB14001 DPA10103-DPB14101 DPA10103-DPB14801 DPA10103-DPB15501 DPA10103-DPB15901 DPA10104-DPB11501 DPA10105-DPB10401 DPA10106-DPB10101 DPA10201-DPB10101 DPA10201-DPB10201 DPA10201-DPB10202 DPA10201-DPB10401 DPA10201-DPB10501 DPA10201-DPB110601 DPA10201-DPB11501 DPA10201-DPB11601 DPA10201-DPB11901 DPA10201-DPB15501 DPA10202-DPB10101 DPA10202-DPB10201 DPA10202-DPB10202 DPA10202-DPB10501 DPA10202-DPB110601 DPA10202-DPB11101 DPA10202-DPB11301 DPA10202-DPB11801 DPA10202-DPB11901 DPA10202-DPB13101 DPA10202-DPB13801 DPA10202-DPB15501 DPA10202-DPB16501 DPA10301-DPB10101 DPA10301-DPB10201 DPA10301-DPB10202 DPA10301-DPB10401 DPA10301-DPB10402 DPA10301-DPB110501 DPA10301-DPB110601 DPA10301-DPB11101 DPA10301-DPB11301 DPA10301-DPB11801 DPA10301-DPB12301 DPA10301-DPB13901 DPA10301-DPB14901 DPA10301-DPB15501; note = HLAs: DPA10301-DPB17501 DPA10301-DPB18001 DPA10401-DPB10202 DPA10401-DPB10402 DPA10401-DPB10501 DPA10401-DPB110501 DPA10401-DPB14901
KEPPYLWVGVELLPDKWTVQ

SEQ ID NO: 7486 - protein, 20 aa, synthetic construct
  source 1..20: note = Seed: KEPPFLWMGYELHPDKWTVQ; note = HLAs: DRB1_0101 DRB1_1001 DPA10103-DPB10101 DPA10103-DPB10201 DPA10103-DPB10202 DPA10103-DPB10401 DPA10103-DPB10501 DPA10103-DPB112601 DPA10103-DPB11501 DPA10103-DPB11601 DPA10103-DPB11801 DPA10103-DPB11901 DPA10103-DPB12301 DPA10103-DPB13101 DPA10103-DPB13401 DPA10103-DPB13901 DPA10103-DPB14001 DPA10103-DPB14101 DPA10103-DPB14801 DPA10103-DPB15001 DPA10103-DPB15501 DPA10103-DPB15901 DPA10104-DPB10101 DPA10104-DPB11501 DPA10105-DPB10101 DPA10105-DPB10401 DPA10105-DPB11801 DPA10105-DPB15001 DPA10106-DPB10101 DPA10201-DPB10101 DPA10201-DPB10201 DPA10201-DPB10202 DPA10201-DPB10401 DPA10201-DPB10501 DPA10201-DPB110601 DPA10201-DPB11501 DPA10201-DPB11601 DPA10201-DPB11901 DPA10201-DPB13401 DPA10201-DPB15501 DPA10202-DPB10101 DPA10202-DPB10201 DPA10202-DPB10202 DPA10202-DPB10401 DPA10202-DPB10501 DPA10202-DPB110601 DPA10202-DPB11101 DPA10202-DPB11301 DPA10202-DPB11801 DPA10202-DPB11901 DPA10202-DPB13101 DPA10202-DPB13801 DPA10202-DPB15501 DPA10202-DPB16501 DPA10301-DPB10101; note = HLAs: DPA10301-DPB10201 DPA10301-DPB10202 DPA10301-DPB10401 DPA10301-DPB10402 DPA10301-DPB110501 DPA10301-DPB110601 DPA10301-DPB11101 DPA10301-DPB11301 DPA10301-DPB11801 DPA10301-DPB12301 DPA10301-DPB13901 DPA10301-DPB14001 DPA10301-DPB14901 DPA10301-DPB15501 DPA10301-DPB16501 DPA10301-DPB17501 DPA10301-DPB18001 DPA10401-DPB10101 DPA10401-DPB10201 DPA10401-DPB10202 DPA10401-DPB10402 DPA10401-DPB10501 DPA10401-DPB110501 DPA10401-DPB14901
KEPPFLWKGIELMPDKWTVQ

SEQ ID NO: 7487 - protein, 20 aa, synthetic construct
  source 1..20: note = Seed: KEPPFLWMGYELHPDKWTVQ; note = HLAs: DRB1_0101 DPA10103-DPB10101 DPA10103-DPB10201 DPA10103-DPB10202 DPA10103-DPB10401 DPA10103-DPB10402 DPA10103-DPB10501 DPA10103-DPB110501 DPA10103-DPB112601 DPA10103-DPB11501 DPA10103-DPB11601 DPA10103-DPB11801 DPA10103-DPB11901 DPA10103-DPB12301 DPA10103-DPB13101 DPA10103-DPB13401 DPA10103-DPB13901 DPA10103-DPB14001 DPA10103-DPB14801 DPA10103-DPB14901 DPA10103-DPB15001 DPA10103-DPB15101 DPA10103-DPB15901 DPA10103-DPB18001 DPA10104-DPB10101 DPA10104-DPB11501 DPA10105-DPB10101 DPA10105-DPB10401 DPA10105-DPB11801 DPA10105-DPB15001 DPA10106-DPB10101 DPA10201-DPB10101 DPA10201-DPB10201 DPA10201-DPB10202 DPA10201-DPB10501 DPA10201-DPB110601 DPA10201-DPB11501 DPA10201-DPB11601 DPA10201-DPB11901 DPA10201-DPB13401 DPA10202-DPB10101 DPA10202-DPB10501 DPA10202-DPB110601 DPA10202-DPB11801 DPA10202-DPB11901 DPA10202-DPB13101 DPA10202-DPB13801 DPA10202-DPB16501 DPA10301-DPB10101 DPA10301-DPB10201 DPA10301-DPB10202 DPA10301-DPB10401 DPA10301-DPB10402 DPA10301-DPB110501 DPA10301-DPB110601; note = HLAs: DPA10301-DPB11101 DPA10301-DPB11301 DPA10301-DPB11801 DPA10301-DPB12301 DPA10301-DPB13901 DPA10301-DPB14001 DPA10301-DPB14901 DPA10301-DPB15501 DPA10301-DPB16501 DPA10301-DPB17501 DPA10301-DPB18001 DPA10401-DPB10101 DPA10401-DPB10201 DPA10401-DPB10402 DPA10401-DPB10501 DPA10401-DPB110501 DPA10401-DPB14901
KEPPFLWVGIELRPDKWTVQ

SEQ ID NO: 7488 - protein, 20 aa, synthetic construct
  source 1..20: note = Seed: KEPPFLWMGYELHPDKWTVQ; note = HLAs: DRB1_0101 DRB1_1001 DPA10103-DPB10101 DPA10103-DPB10201 DPA10103-DPB10202 DPA10103-DPB10401 DPA10103-DPB10402 DPA10103-DPB10501 DPA10103-DPB110501 DPA10103-DPB112601 DPA10103-DPB11501 DPA10103-DPB11601 DPA10103-DPB11801 DPA10103-DPB11901 DPA10103-DPB12301 DPA10103-DPB13101 DPA10103-DPB13401 DPA10103-DPB13901 DPA10103-DPB14001 DPA10103-DPB14101 DPA10103-DPB14801 DPA10103-DPB14901 DPA10103-DPB15001 DPA10103-DPB15101 DPA10103-DPB15501 DPA10103-DPB15901 DPA10103-DPB18001 DPA10104-DPB10101 DPA10104-DPB11501 DPA10105-DPB10101 DPA10105-DPB10401 DPA10105-DPB11801 DPA10105-DPB15001 DPA10106-DPB10101 DPA10201-DPB10101 DPA10201-DPB10201 DPA10201-DPB10202 DPA10201-DPB110601 DPA10201-DPB11501 DPA10201-DPB11601 DPA10201-DPB11901 DPA10201-DPB13401 DPA10201-DPB15501 DPA10202-DPB10101 DPA10202-DPB10201 DPA10202-DPB10202 DPA10202-DPB10401 DPA10202-DPB10501 DPA10202-DPB110601 DPA10202-DPB11101 DPA10202-DPB11301 DPA10202-DPB11801 DPA10202-DPB11901 DPA10202-DPB13101 DPA10202-DPB13801; note = HLAs: DPA10202-DPB15501 DPA10202-DPB16501 DPA10301-DPB10101 DPA10301-DPB10201 DPA10301-DPB10202 DPA10301-DPB10401 DPA10301-DPB10402 DPA10301-DPB110501 DPA10301-DPB110601 DPA10301-DPB11101 DPA10301-DPB11301 DPA10301-DPB11801 DPA10301-DPB12301 DPA10301-DPB13901 DPA10301-DPB14001 DPA10301-DPB14901 DPA10301-DPB15501 DPA10301-DPB16501 DPA10301-DPB17501 DPA10301-DPB18001 DPA10401-DPB10101 DPA10401-DPB10201 DPA10401-DPB10202 DPA10401-DPB10402 DPA10401-DPB10501 DPA10401-DPB110501 DPA10401-DPB14901
KEPPFLWHGAELVPDKWTVQ

SEQ ID NO: 7489 - protein, 20 aa, synthetic construct
  source 1..20: note = Seed: KEPPFLWMGYELHPDKWTVQ; note = HLAs: DRB1_0101 DRB1_0405 DRB1_1001 DPA10103-DPB11501 DPA10103-DPB11801 DPA10103-DPB13401 DPA10103-DPB14001 DPA10104-DPB11501 DPA10105-DPB11801 DPA10106-DPB10101 DPA10201-DPB10101 DPA10201-DPB10201 DPA10201-DPB10202 DPA10201-DPB10401 DPA10201-DPB10501 DPA10201-DPB110601 DPA10201-DPB11501 DPA10201-DPB11601 DPA10201-DPB11901 DPA10201-DPB15501 DPA10202-DPB10101 DPA10202-DPB10201 DPA10202-DPB10202 DPA10202-DPB10401 DPA10202-DPB10501 DPA10202-DPB110601 DPA10202-DPB11101 DPA10202-DPB11301 DPA10202-DPB11801 DPA10202-DPB11901 DPA10202-DPB13101 DPA10202-DPB13801 DPA10202-DPB15501 DPA10202-DPB16501 DPA10301-DPB10101 DPA10301-DPB10201 DPA10301-DPB10202 DPA10301-DPB10401 DPA10301-DPB10402 DPA10301-DPB110501 DPA10301-DPB110601 DPA10301-DPB11101 DPA10301-DPB11301 DPA10301-DPB11801 DPA10301-DPB12301 DPA10301-DPB13901 DPA10301-DPB14001 DPA10301-DPB14901 DPA10301-DPB15501 DPA10301-DPB16501 DPA10301-DPB17501 DPA10301-DPB18001
KEPPFLWVGNELLPDKWTVQ

SEQ ID NO: 7490 - protein, 20 aa, synthetic construct
  source 1..20: note = Seed: KEPPFLWMGYELHPDKWTVQ; note = HLAs: DRB1_0101 DRB1_0405 DRB1_1001 DPA10103-DPB13401 DPA10201-DPB10201 DPA10201-DPB10202 DPA10201-DPB10401 DPA10201-DPB10501 DPA10201-DPB110601 DPA10201-DPB11501 DPA10201-DPB11601 DPA10201-DPB11901 DPA10201-DPB13401 DPA10201-DPB15501 DPA10202-DPB10101 DPA10202-DPB10201 DPA10202-DPB10202 DPA10202-DPB10501 DPA10202-DPB110601 DPA10202-DPB11101 DPA10202-DPB11301 DPA10202-DPB11801 DPA10202-DPB11901 DPA10202-DPB13101 DPA10202-DPB13801 DPA10202-DPB15501 DPA10202-DPB16501 DPA10301-DPB10201 DPA10301-DPB10202 DPA10301-DPB10402 DPA10301-DPB110501 DPA10301-DPB11801 DPA10301-DPB14901 DPA10301-DPB17501 DPA10301-DPB18001 DPA10401-DPB10402 DPA10401-DPB110501 DPA10401-DPB14901
KEPPYLWIGTELLPDKWTVQ

SEQ ID NO: 7491 - protein, 20 aa, synthetic construct
  source 1..20: note = Seed: KEPPFLWMGYELHPDKWTVQ; note = HLAs: DPA10103-DPB10201 DPA10103-DPB10202 DPA10103-DPB10401 DPA10103-DPB10501 DPA10103-DPB112601 DPA10103-DPB11501 DPA10103-DPB11601 DPA10103-DPB11801 DPA10103-DPB11901 DPA10103-DPB12301 DPA10103-DPB13101 DPA10103-DPB13401 DPA10103-DPB13901 DPA10103-DPB14001 DPA10103-DPB14101 DPA10103-DPB14801 DPA10104-DPB11501 DPA10105-DPB10401 DPA10105-DPB11801 DPA10201-DPB10201 DPA10201-DPB10202 DPA10201-DPB10401 DPA10201-DPB10501 DPA10201-DPB110601 DPA10201-DPB11501 DPA10201-DPB11601 DPA10201-DPB11901 DPA10201-DPB13401 DPA10202-DPB10201 DPA10202-DPB10202 DPA10202-DPB10401 DPA10202-DPB110601 DPA10202-DPB11801 DPA10202-DPB11901 DPA10202-DPB13101 DPA10301-DPB10201 DPA10301-DPB10202 DPA10301-DPB10402 DPA10301-DPB110501 DPA10301-DPB110601 DPA10301-DPB14001 DPA10301-DPB14901 DPA10301-DPB17501 DPA10301-DPB18001 DPA10401-DPB10201 DPA10401-DPB10202 DPA10401-DPB10402 DPA10401-DPB110501 DPA10401-DPB14901
KEPPVLWRGFELLPDKWTVQ

SEQ ID NO: 7492 - protein, 20 aa, synthetic construct
  source 1..20: note = Seed: KEPPFLWMGYELHPDKWTVQ; note = HLAs: DRB1_0101 DRB1_1001 DPA10103-DPB10101 DPA10103-DPB10201 DPA10103-DPB10202 DPA10103-DPB10401 DPA10103-DPB10402 DPA10103-DPB10501 DPA10103-DPB110501 DPA10103-DPB112601 DPA10103-DPB11501 DPA10103-DPB11601 DPA10103-DPB11801 DPA10103-DPB11901 DPA10103-DPB12301 DPA10103-DPB13101 DPA10103-DPB13401 DPA10103-DPB13901 DPA10103-DPB14001 DPA10103-DPB14101 DPA10103-DPB14801 DPA10103-DPB14901 DPA10103-DPB15001 DPA10103-DPB15101 DPA10103-DPB15501 DPA10103-DPB15901 DPA10103-DPB18001 DPA10104-DPB10101 DPA10104-DPB11501 DPA10105-DPB10101 DPA10105-DPB10401 DPA10105-DPB11801 DPA10105-DPB15001 DPA10106-DPB10101 DPA10201-DPB10101 DPA10201-DPB10201 DPA10201-DPB10202 DPA10201-DPB10501 DPA10201-DPB110601 DPA10201-DPB11501 DPA10201-DPB11601 DPA10201-DPB11901 DPA10201-DPB13401 DPA10201-DPB15501 DPA10202-DPB10101 DPA10202-DPB10201 DPA10202-DPB10202 DPA10202-DPB10401 DPA10202-DPB10501 DPA10202-DPB110601 DPA10202-DPB11101 DPA10202-DPB11301 DPA10202-DPB11801 DPA10202-DPB11901 DPA10202-DPB13101; note = HLAs: DPA10202-DPB13801 DPA10202-DPB15501 DPA10202-DPB16501 DPA10301-DPB10101 DPA10301-DPB10201 DPA10301-DPB10202 DPA10301-DPB10401 DPA10301-DPB10402 DPA10301-DPB110501 DPA10301-DPB110601 DPA10301-DPB11101 DPA10301-DPB11301 DPA10301-DPB11801 DPA10301-DPB12301 DPA10301-DPB13901 DPA10301-DPB14001 DPA10301-DPB14901 DPA10301-DPB15501 DPA10301-DPB16501 DPA10301-DPB17501 DPA10301-DPB18001 DPA10401-DPB10101 DPA10401-DPB10201 DPA10401-DPB10202 DPA10401-DPB10402 DPA10401-DPB10501 DPA10401-DPB110501 DPA10401-DPB14901
KEPPFLWHGIELSPDKWTVQ

SEQ ID NO: 7493 - protein, 20 aa, synthetic construct
  source 1..20: note = Seed: KEPPFLWMGYELHPDKWTVQ; note = HLAs: DPA10103-DPB10101 DPA10103-DPB10201 DPA10103-DPB10202 DPA10103-DPB10401 DPA10103-DPB10402 DPA10103-DPB10501 DPA10103-DPB110501 DPA10103-DPB112601 DPA10103-DPB11501 DPA10103-DPB11601 DPA10103-DPB11801 DPA10103-DPB11901 DPA10103-DPB12301 DPA10103-DPB13101 DPA10103-DPB13401 DPA10103-DPB13901 DPA10103-DPB14001 DPA10103-DPB14101 DPA10103-DPB14801 DPA10103-DPB14901 DPA10103-DPB15001 DPA10103-DPB15101 DPA10103-DPB15901 DPA10103-DPB18001 DPA10104-DPB10101 DPA10104-DPB11501 DPA10105-DPB10101 DPA10105-DPB10401 DPA10105-DPB11801 DPA10105-DPB15001 DPA10106-DPB10101 DPA10201-DPB10101 DPA10201-DPB10201 DPA10201-DPB10202 DPA10201-DPB10401 DPA10201-DPB10501 DPA10201-DPB110601 DPA10201-DPB11501 DPA10201-DPB11601 DPA10201-DPB11901 DPA10201-DPB13401 DPA10202-DPB10101 DPA10202-DPB10201 DPA10202-DPB10202 DPA10202-DPB10401 DPA10202-DPB10501 DPA10202-DPB110601 DPA10202-DPB11101 DPA10202-DPB11301 DPA10202-DPB11801 DPA10202-DPB11901 DPA10202-DPB13101 DPA10202-DPB13801 DPA10202-DPB15501 DPA10202-DPB16501; note = HLAs: DPA10301-DPB10101 DPA10301-DPB10201 DPA10301-DPB10202 DPA10301-DPB10401 DPA10301-DPB10402 DPA10301-DPB110501 DPA10301-DPB110601 DPA10301-DPB11101 DPA10301-DPB11301 DPA10301-DPB11801 DPA10301-DPB12301 DPA10301-DPB13901 DPA10301-DPB14001 DPA10301-DPB14901 DPA10301-DPB15501 DPA10301-DPB16501 DPA10301-DPB17501 DPA10301-DPB18001 DPA10401-DPB10101 DPA10401-DPB10201 DPA10401-DPB10202 DPA10401-DPB10402 DPA10401-DPB10501 DPA10401-DPB110501 DPA10401-DPB14901
KEPPFLWIGLELRPDKWTVQ

SEQ ID NO: 7494 - protein, 20 aa, synthetic construct
  source 1..20: note = Seed: KEPPFLWMGYELHPDKWTVQ; note = HLAs: DRB1_0101 DPA10103-DPB10101 DPA10103-DPB10201 DPA10103-DPB10202 DPA10103-DPB10401 DPA10103-DPB10402 DPA10103-DPB10501 DPA10103-DPB110501 DPA10103-DPB112601 DPA10103-DPB11501 DPA10103-DPB11601 DPA10103-DPB11801 DPA10103-DPB11901 DPA10103-DPB12301 DPA10103-DPB13101 DPA10103-DPB13401 DPA10103-DPB13901 DPA10103-DPB14001 DPA10103-DPB14101 DPA10103-DPB14801 DPA10103-DPB14901 DPA10103-DPB15001 DPA10103-DPB15101 DPA10103-DPB15501 DPA10103-DPB15901 DPA10103-DPB18001 DPA10104-DPB10101 DPA10104-DPB11501 DPA10105-DPB10101 DPA10105-DPB10401 DPA10105-DPB11801 DPA10105-DPB15001 DPA10106-DPB10101 DPA10201-DPB10101 DPA10201-DPB10201 DPA10201-DPB10202 DPA10201-DPB10401 DPA10201-DPB110601 DPA10201-DPB11501 DPA10201-DPB11601 DPA10201-DPB11901 DPA10201-DPB13401 DPA10201-DPB15501 DPA10202-DPB10101 DPA10202-DPB10201 DPA10202-DPB10202 DPA10202-DPB10401 DPA10202-DPB10501 DPA10202-DPB110601 DPA10202-DPB11301 DPA10202-DPB11801 DPA10202-DPB11901 DPA10202-DPB13101 DPA10202-DPB13801 DPA10202-DPB15501; note = HLAs: DPA10202-DPB16501 DPA10301-DPB10101 DPA10301-DPB10201 DPA10301-DPB10202 DPA10301-DPB10401 DPA10301-DPB10402 DPA10301-DPB110501 DPA10301-DPB110601 DPA10301-DPB11101 DPA10301-DPB11301 DPA10301-DPB11801 DPA10301-DPB12301 DPA10301-DPB13901 DPA10301-DPB14001 DPA10301-DPB14901 DPA10301-DPB15501 DPA10301-DPB16501 DPA10301-DPB17501 DPA10301-DPB18001 DPA10401-DPB10101 DPA10401-DPB10201 DPA10401-DPB10202 DPA10401-DPB10402 DPA10401-DPB10501 DPA10401-DPB110501 DPA10401-DPB14901
KEPPILWQGYELVPDKWTVQ

SEQ ID NO: 7495 - protein, 20 aa, synthetic construct
  source 1..20: note = Seed: KEPPFLWMGYELHPDKWTVQ; note = HLAs: DRB1_0101 DRB1_0405 DRB1_1001 DPA10103-DPB11501 DPA10103-DPB11801 DPA10103-DPB13401 DPA10103-DPB14001 DPA10103-DPB15901 DPA10104-DPB11501 DPA10105-DPB11801 DPA10106-DPB10101 DPA10201-DPB10101 DPA10201-DPB10201 DPA10201-DPB10202 DPA10201-DPB10401 DPA10201-DPB10501 DPA10201-DPB110601 DPA10201-DPB11501 DPA10201-DPB11601 DPA10201-DPB11901 DPA10201-DPB13401 DPA10201-DPB15501 DPA10202-DPB10101 DPA10202-DPB10201 DPA10202-DPB10202 DPA10202-DPB10401 DPA10202-DPB10501 DPA10202-DPB110601 DPA10202-DPB11101 DPA10202-DPB11301 DPA10202-DPB11801 DPA10202-DPB11901 DPA10202-DPB13101 DPA10202-DPB13801 DPA10202-DPB15501 DPA10202-DPB16501 DPA10301-DPB10201 DPA10301-DPB10202 DPA10301-DPB10401 DPA10301-DPB10402 DPA10301-DPB110501 DPA10301-DPB110601 DPA10301-DPB11101 DPA10301-DPB11301 DPA10301-DPB11801 DPA10301-DPB12301 DPA10301-DPB13901 DPA10301-DPB14001 DPA10301-DPB14901 DPA10301-DPB15501 DPA10301-DPB16501 DPA10301-DPB17501 DPA10301-DPB18001 DPA10401-DPB10402 DPA10401-DPB110501 DPA10401-DPB14901
KEPPYLWIGSELLPDKWTVQ

SEQ ID NO: 7496 - protein, 20 aa, synthetic construct
  source 1..20: note = Seed: KEPPFLWMGYELHPDKWTVQ; note = HLAs: DRB1_0101 DRB1_0405 DRB1_1001 DPA10103-DPB10201 DPA10103-DPB10202 DPA10103-DPB10401 DPA10103-DPB112601 DPA10103-DPB11501 DPA10103-DPB11801 DPA10103-DPB12301 DPA10103-DPB13401 DPA10103-DPB13901 DPA10103-DPB14001 DPA10103-DPB14101 DPA10103-DPB14801 DPA10103-DPB15501 DPA10103-DPB15901 DPA10104-DPB11501 DPA10105-DPB10401 DPA10105-DPB11801 DPA10106-DPB10101 DPA10201-DPB10101 DPA10201-DPB10201 DPA10201-DPB10202 DPA10201-DPB10401 DPA10201-DPB10501 DPA10201-DPB110601 DPA10201-DPB11501 DPA10201-DPB11601 DPA10201-DPB11901 DPA10202-DPB10101 DPA10202-DPB10201 DPA10202-DPB10202 DPA10202-DPB10401 DPA10202-DPB10501 DPA10202-DPB110601 DPA10202-DPB11101 DPA10202-DPB11301 DPA10202-DPB11801 DPA10202-DPB11901 DPA10202-DPB13101 DPA10202-DPB13801 DPA10202-DPB15501 DPA10202-DPB16501 DPA10301-DPB10201 DPA10301-DPB10202 DPA10301-DPB10401 DPA10301-DPB10402 DPA10301-DPB110501 DPA10301-DPB110601 DPA10301-DPB11101 DPA10301-DPB11301 DPA10301-DPB11801 DPA10301-DPB12301 DPA10301-DPB13901 DPA10301-DPB14001; note = HLAs: DPA10301-DPB14901 DPA10301-DPB15501 DPA10301-DPB16501 DPA10301-DPB17501 DPA10301-DPB18001 DPA10401-DPB10202 DPA10401-DPB10402 DPA10401-DPB110501 DPA10401-DPB14901
KEPPYLWLGVELLPDKWTVQ

SEQ ID NO: 7497 - protein, 14 aa, synthetic construct
  source 1..14: note = Seed: PPFLWMGYELHPDK; note = HLAs: DPA10103-DPB10101 DPA10103-DPB10201 DPA10103-DPB10202 DPA10103-DPB10401 DPA10103-DPB112601 DPA10103-DPB11501 DPA10103-DPB11601 DPA10103-DPB11901 DPA10103-DPB12301 DPA10103-DPB13101 DPA10103-DPB13401 DPA10103-DPB13901 DPA10103-DPB14001 DPA10103-DPB14101 DPA10103-DPB14801 DPA10103-DPB15001 DPA10103-DPB15901 DPA10104-DPB10101 DPA10104-DPB11501 DPA10105-DPB10101 DPA10105-DPB10401 DPA10105-DPB15001 DPA10106-DPB10101 DPA10201-DPB10101 DPA10201-DPB110601 DPA10201-DPB11501 DPA10201-DPB11601 DPA10201-DPB11901 DPA10202-DPB10101 DPA10202-DPB10201 DPA10202-DPB10202 DPA10202-DPB10401 DPA10202-DPB110601 DPA10202-DPB11901 DPA10202-DPB13101 DPA10202-DPB16501 DPA10301-DPB10101 DPA10301-DPB10201 DPA10301-DPB10202 DPA10301-DPB10401 DPA10301-DPB10402 DPA10301-DPB110501 DPA10301-DPB110601 DPA10301-DPB11801 DPA10301-DPB12301 DPA10301-DPB13901 DPA10301-DPB14001 DPA10301-DPB14901 DPA10301-DPB15501 DPA10301-DPB16501 DPA10301-DPB17501 DPA10301-DPB18001 DPA10401-DPB10101 DPA10401-DPB10201; note = HLAs: DPA10401-DPB10202 DPA10401-DPB10402 DPA10401-DPB10501 DPA10401-DPB110501 DPA10401-DPB14901
PPFLWHGLELTPDK

SEQ ID NO: 7498 - protein, 20 aa, synthetic construct
  source 1..20: note = Seed: KEPPFLWMGYELHPDKWTVQ; note = HLAs: DRB1_0101 DRB1_0405 DRB1_1001 DPA10103-DPB10201 DPA10103-DPB10202 DPA10103-DPB10401 DPA10103-DPB10402 DPA10103-DPB10501 DPA10103-DPB110501 DPA10103-DPB112601 DPA10103-DPB11501 DPA10103-DPB11601 DPA10103-DPB11801 DPA10103-DPB11901 DPA10103-DPB12301 DPA10103-DPB13401 DPA10103-DPB13901 DPA10103-DPB14001 DPA10103-DPB14101 DPA10103-DPB14801 DPA10103-DPB14901 DPA10103-DPB15001 DPA10103-DPB15101 DPA10103-DPB15501 DPA10103-DPB15901 DPA10103-DPB18001 DPA10104-DPB11501 DPA10105-DPB10401 DPA10105-DPB11801 DPA10105-DPB15001 DPA10106-DPB10101 DPA10201-DPB10101 DPA10201-DPB10201 DPA10201-DPB10202 DPA10201-DPB10501 DPA10201-DPB110601 DPA10201-DPB11501 DPA10201-DPB11601 DPA10201-DPB11901 DPA10201-DPB15501 DPA10202-DPB10101 DPA10202-DPB10201 DPA10202-DPB10202 DPA10202-DPB10501 DPA10202-DPB110601 DPA10202-DPB11101 DPA10202-DPB11801 DPA10202-DPB11901 DPA10202-DPB13101 DPA10202-DPB13801 DPA10202-DPB15501 DPA10202-DPB16501 DPA10301-DPB10101 DPA10301-DPB10201 DPA10301-DPB10202 DPA10301-DPB10401; note = HLAs: DPA10301-DPB10402 DPA10301-DPB110501 DPA10301-DPB110601 DPA10301-DPB11101 DPA10301-DPB11301 DPA10301-DPB11801 DPA10301-DPB12301 DPA10301-DPB13901 DPA10301-DPB14001 DPA10301-DPB14901 DPA10301-DPB15501 DPA10301-DPB17501 DPA10301-DPB18001 DPA10401-DPB10201 DPA10401-DPB10202 DPA10401-DPB10402 DPA10401-DPB10501 DPA10401-DPB110501 DPA10401-DPB14901
KEPPFLWMGIELAPDKWTVQ

SEQ ID NO: 7499 - protein, 20 aa, synthetic construct
  source 1..20: note = Seed: KEPPFLWMGYELHPDKWTVQ; note = HLAs: DPA10103-DPB10101 DPA10103-DPB10201 DPA10103-DPB10202 DPA10103-DPB10401 DPA10103-DPB10402 DPA10103-DPB10501 DPA10103-DPB110501 DPA10103-DPB112601 DPA10103-DPB11501 DPA10103-DPB11601 DPA10103-DPB11801 DPA10103-DPB11901 DPA10103-DPB12301 DPA10103-DPB13101 DPA10103-DPB13401 DPA10103-DPB13901 DPA10103-DPB14001 DPA10103-DPB14101 DPA10103-DPB14801 DPA10103-DPB14901 DPA10103-DPB15001 DPA10103-DPB15101 DPA10103-DPB15901 DPA10103-DPB18001 DPA10104-DPB10101 DPA10104-DPB11501 DPA10105-DPB10101 DPA10105-DPB10401 DPA10105-DPB11801 DPA10105-DPB15001 DPA10106-DPB10101 DPA10201-DPB10101 DPA10201-DPB10201 DPA10201-DPB10202 DPA10201-DPB10401 DPA10201-DPB10501 DPA10201-DPB110601 DPA10201-DPB11501 DPA10201-DPB11601 DPA10201-DPB11901 DPA10201-DPB13401 DPA10202-DPB10101 DPA10202-DPB10201 DPA10202-DPB10202 DPA10202-DPB10401 DPA10202-DPB10501 DPA10202-DPB110601 DPA10202-DPB11101 DPA10202-DPB11301 DPA10202-DPB11801 DPA10202-DPB11901 DPA10202-DPB13101 DPA10202-DPB13801 DPA10202-DPB15501 DPA10202-DPB16501; note = HLAs: DPA10301-DPB10101 DPA10301-DPB10201 DPA10301-DPB10202 DPA10301-DPB10401 DPA10301-DPB10402 DPA10301-DPB110501 DPA10301-DPB110601 DPA10301-DPB11101 DPA10301-DPB11301 DPA10301-DPB11801 DPA10301-DPB12301 DPA10301-DPB13901 DPA10301-DPB14001 DPA10301-DPB14901 DPA10301-DPB15501 DPA10301-DPB16501 DPA10301-DPB17501 DPA10301-DPB18001 DPA10401-DPB10101 DPA10401-DPB10201 DPA10401-DPB10202 DPA10401-DPB10402 DPA10401-DPB10501 DPA10401-DPB110501 DPA10401-DPB14901
KEPPFLWVGLELRPDKWTVQ

SEQ ID NO: 7500 - protein, 14 aa, synthetic construct
  source 1..14: note = Seed: PPFLWMGYELHPDK; note = HLAs: DPA10103-DPB10101 DPA10103-DPB10201 DPA10103-DPB10202 DPA10103-DPB10401 DPA10103-DPB112601 DPA10103-DPB11501 DPA10103-DPB11601 DPA10103-DPB11901 DPA10103-DPB12301 DPA10103-DPB13101 DPA10103-DPB13401 DPA10103-DPB13901 DPA10103-DPB14001 DPA10103-DPB14101 DPA10103-DPB14801 DPA10103-DPB15001 DPA10103-DPB15901 DPA10104-DPB10101 DPA10104-DPB11501 DPA10105-DPB10101 DPA10105-DPB10401 DPA10105-DPB15001 DPA10106-DPB10101 DPA10201-DPB10101 DPA10201-DPB110601 DPA10201-DPB11501 DPA10201-DPB11601 DPA10201-DPB11901 DPA10202-DPB10101 DPA10202-DPB10201 DPA10202-DPB10202 DPA10202-DPB10401 DPA10202-DPB110601 DPA10202-DPB11901 DPA10202-DPB13101 DPA10202-DPB16501 DPA10301-DPB10201 DPA10301-DPB10202 DPA10301-DPB10401 DPA10301-DPB10402 DPA10301-DPB110501 DPA10301-DPB110601 DPA10301-DPB11801 DPA10301-DPB12301 DPA10301-DPB13901 DPA10301-DPB14001 DPA10301-DPB14901 DPA10301-DPB17501 DPA10301-DPB18001 DPA10401-DPB10101 DPA10401-DPB10201 DPA10401-DPB10202 DPA10401-DPB10501
PPLLWRGFELMPDK

SEQ ID NO: 7501 - protein, 20 aa, synthetic construct
  source 1..20: note = Seed: KEPPFLWMGYELHPDKWTVQ; note = HLAs: DRB1_0101 DRB1_0405 DRB1_1001 DPA10103-DPB10101 DPA10103-DPB10201 DPA10103-DPB10202 DPA10103-DPB10401 DPA10103-DPB10402 DPA10103-DPB10501 DPA10103-DPB110501 DPA10103-DPB112601 DPA10103-DPB11501 DPA10103-DPB11601 DPA10103-DPB11801 DPA10103-DPB11901 DPA10103-DPB12301 DPA10103-DPB13101 DPA10103-DPB13401 DPA10103-DPB13901 DPA10103-DPB14001 DPA10103-DPB14101 DPA10103-DPB14801 DPA10103-DPB14901 DPA10103-DPB15001 DPA10103-DPB15101 DPA10103-DPB15501 DPA10103-DPB15901 DPA10103-DPB18001 DPA10104-DPB10101 DPA10104-DPB11501 DPA10105-DPB10101 DPA10105-DPB10401 DPA10105-DPB11801 DPA10105-DPB15001 DPA10106-DPB10101 DPA10201-DPB10101 DPA10201-DPB10201 DPA10201-DPB10202 DPA10201-DPB10401 DPA10201-DPB10501 DPA10201-DPB110601 DPA10201-DPB11501 DPA10201-DPB11601 DPA10201-DPB11901 DPA10201-DPB13401 DPA10201-DPB15501 DPA10202-DPB10101 DPA10202-DPB10201 DPA10202-DPB10202 DPA10202-DPB10401 DPA10202-DPB10501 DPA10202-DPB110601 DPA10202-DPB11101 DPA10202-DPB11301 DPA10202-DPB11801 DPA10202-DPB11901; note = HLAs: DPA10202-DPB13101 DPA10202-DPB13801 DPA10202-DPB15501 DPA10202-DPB16501 DPA10301-DPB10101 DPA10301-DPB10201 DPA10301-DPB10202 DPA10301-DPB10401 DPA10301-DPB10402 DPA10301-DPB110501 DPA10301-DPB110601 DPA10301-DPB11101 DPA10301-DPB11801 DPA10301-DPB12301 DPA10301-DPB13901 DPA10301-DPB14001 DPA10301-DPB14901 DPA10301-DPB15501 DPA10301-DPB16501 DPA10301-DPB17501 DPA10301-DPB18001 DPA10401-DPB10101 DPA10401-DPB10201 DPA10401-DPB10202 DPA10401-DPB10402 DPA10401-DPB10501 DPA10401-DPB110501 DPA10401-DPB14901
KEPPFLWEGVELFPDKWTVQ

SEQ ID NO: 7502 - protein, 20 aa, synthetic construct
  source 1..20: note = Seed: KEPPFLWMGYELHPDKWTVQ; note = HLAs: DPA10103-DPB10101 DPA10103-DPB10201 DPA10103-DPB10202 DPA10103-DPB10401 DPA10103-DPB10402 DPA10103-DPB10501 DPA10103-DPB110501 DPA10103-DPB112601 DPA10103-DPB11501 DPA10103-DPB11601 DPA10103-DPB11801 DPA10103-DPB11901 DPA10103-DPB12301 DPA10103-DPB13101 DPA10103-DPB13401 DPA10103-DPB13901 DPA10103-DPB14001 DPA10103-DPB14101 DPA10103-DPB14801 DPA10103-DPB14901 DPA10103-DPB15001 DPA10103-DPB15101 DPA10103-DPB15501 DPA10103-DPB15901 DPA10103-DPB18001 DPA10104-DPB10101 DPA10104-DPB11501 DPA10105-DPB10101 DPA10105-DPB10401 DPA10105-DPB11801 DPA10105-DPB15001 DPA10106-DPB10101 DPA10201-DPB10101 DPA10201-DPB10201 DPA10201-DPB10202 DPA10201-DPB10401 DPA10201-DPB110601 DPA10201-DPB11501 DPA10201-DPB11601 DPA10201-DPB11901 DPA10201-DPB13401 DPA10201-DPB15501 DPA10202-DPB10101 DPA10202-DPB10201 DPA10202-DPB10202 DPA10202-DPB10401 DPA10202-DPB10501 DPA10202-DPB110601 DPA10202-DPB11301 DPA10202-DPB11801 DPA10202-DPB11901 DPA10202-DPB13101 DPA10202-DPB13801 DPA10202-DPB15501 DPA10202-DPB16501; note = HLAs: DPA10301-DPB10101 DPA10301-DPB10201 DPA10301-DPB10202 DPA10301-DPB10401 DPA10301-DPB10402 DPA10301-DPB110501 DPA10301-DPB110601 DPA10301-DPB11101 DPA10301-DPB11301 DPA10301-DPB11801 DPA10301-DPB12301 DPA10301-DPB13901 DPA10301-DPB14001 DPA10301-DPB14901 DPA10301-DPB15501 DPA10301-DPB16501 DPA10301-DPB17501 DPA10301-DPB18001 DPA10401-DPB10101 DPA10401-DPB10201 DPA10401-DPB10202 DPA10401-DPB10402 DPA10401-DPB10501 DPA10401-DPB110501 DPA10401-DPB14901
KEPPILWSGWELMPDKWTVQ

SEQ ID NO: 7503 - protein, 20 aa, synthetic construct
  source 1..20: note = Seed: KEPPFLWMGYELHPDKWTVQ; note = HLAs: DPA10103-DPB10101 DPA10103-DPB10201 DPA10103-DPB10401 DPA10103-DPB10501 DPA10103-DPB112601 DPA10103-DPB11601 DPA10103-DPB11901 DPA10103-DPB12301 DPA10103-DPB13101 DPA10103-DPB13401 DPA10103-DPB13901 DPA10103-DPB14001 DPA10103-DPB14801 DPA10103-DPB15001 DPA10103-DPB15501 DPA10104-DPB10101 DPA10105-DPB10101 DPA10105-DPB10401 DPA10105-DPB15001 DPA10106-DPB10101 DPA10201-DPB10101 DPA10201-DPB10201 DPA10201-DPB10202 DPA10201-DPB10501 DPA10201-DPB110601 DPA10201-DPB11501 DPA10201-DPB11601 DPA10201-DPB11901 DPA10201-DPB13401 DPA10201-DPB15501 DPA10202-DPB10101 DPA10202-DPB10401 DPA10202-DPB10501 DPA10202-DPB110601 DPA10202-DPB11101 DPA10202-DPB11801 DPA10202-DPB11901 DPA10202-DPB13101 DPA10202-DPB13801 DPA10202-DPB15501 DPA10202-DPB16501 DPA10301-DPB10202 DPA10301-DPB10401 DPA10301-DPB10402 DPA10301-DPB110501 DPA10301-DPB110601 DPA10301-DPB12301 DPA10301-DPB13901 DPA10301-DPB14001 DPA10301-DPB14901 DPA10301-DPB16501 DPA10301-DPB17501 DPA10301-DPB18001 DPA10401-DPB10101; note = HLAs: DPA10401-DPB10201 DPA10401-DPB10501
KEPPHLWIGFELFPDKWTVQ

SEQ ID NO: 7504 - protein, 14 aa, synthetic construct
  source 1..14: note = Seed: PPFLWMGYELHPDK; note = HLAs: DPA10103-DPB10101 DPA10103-DPB10201 DPA10103-DPB10202 DPA10103-DPB10401 DPA10103-DPB112601 DPA10103-DPB11501 DPA10103-DPB11601 DPA10103-DPB11901 DPA10103-DPB12301 DPA10103-DPB13101 DPA10103-DPB13401 DPA10103-DPB13901 DPA10103-DPB14001 DPA10103-DPB14101 DPA10103-DPB14801 DPA10103-DPB15001 DPA10103-DPB15901 DPA10104-DPB10101 DPA10104-DPB11501 DPA10105-DPB10101 DPA10105-DPB10401 DPA10105-DPB15001 DPA10106-DPB10101 DPA10201-DPB10101 DPA10201-DPB110601 DPA10201-DPB11501 DPA10201-DPB11601 DPA10201-DPB11901 DPA10202-DPB10101 DPA10202-DPB10201 DPA10202-DPB10202 DPA10202-DPB10401 DPA10202-DPB110601 DPA10202-DPB11901 DPA10202-DPB13101 DPA10202-DPB16501 DPA10301-DPB10101 DPA10301-DPB10201 DPA10301-DPB10202 DPA10301-DPB10401 DPA10301-DPB10402 DPA10301-DPB110501 DPA10301-DPB110601 DPA10301-DPB11801 DPA10301-DPB12301 DPA10301-DPB13901 DPA10301-DPB14001 DPA10301-DPB14901 DPA10301-DPB15501 DPA10301-DPB16501 DPA10301-DPB17501 DPA10301-DPB18001 DPA10401-DPB10101 DPA10401-DPB10201; note = HLAs: DPA10401-DPB10202 DPA10401-DPB10402 DPA10401-DPB10501 DPA10401-DPB110501 DPA10401-DPB14901
PPFLWHGWELYPDK

SEQ ID NO: 7505 - protein, 20 aa, synthetic construct
  source 1..20: note = Seed: KEPPFLWMGYELHPDKWTVQ; note = HLAs: DRB1_0101 DRB1_0405 DRB1_1001 DPA10103-DPB10101 DPA10103-DPB10202 DPA10103-DPB10401 DPA10103-DPB10501 DPA10103-DPB112601 DPA10103-DPB11501 DPA10103-DPB11601 DPA10103-DPB11801 DPA10103-DPB11901 DPA10103-DPB12301 DPA10103-DPB13401 DPA10103-DPB13901 DPA10103-DPB14001 DPA10103-DPB14101 DPA10103-DPB15001 DPA10103-DPB15901 DPA10104-DPB10101 DPA10104-DPB11501 DPA10105-DPB10101 DPA10105-DPB10401 DPA10105-DPB11801 DPA10105-DPB15001 DPA10106-DPB10101 DPA10201-DPB10101 DPA10201-DPB10401 DPA10201-DPB10501 DPA10201-DPB110601 DPA10201-DPB11501 DPA10201-DPB11901 DPA10202-DPB10101 DPA10202-DPB10202 DPA10202-DPB10501 DPA10202-DPB11101 DPA10202-DPB11801 DPA10202-DPB13101 DPA10202-DPB13801 DPA10202-DPB16501 DPA10301-DPB10101 DPA10301-DPB10201 DPA10301-DPB10202 DPA10301-DPB10401 DPA10301-DPB10402 DPA10301-DPB110501 DPA10301-DPB110601 DPA10301-DPB11101 DPA10301-DPB11301 DPA10301-DPB11801 DPA10301-DPB12301 DPA10301-DPB13901 DPA10301-DPB14001 DPA10301-DPB14901 DPA10301-DPB15501 DPA10301-DPB16501; note = HLAs: DPA10301-DPB17501 DPA10301-DPB18001 DPA10401-DPB10202 DPA10401-DPB10402 DPA10401-DPB10501 DPA10401-DPB110501 DPA10401-DPB14901
KEPPFLWLGIELEPDKWTVQ

SEQ ID NO: 7506 - protein, 20 aa, synthetic construct
  source 1..20: note = Seed: KEPPFLWMGYELHPDKWTVQ; note = HLAs: DPA10103-DPB10101 DPA10103-DPB10501 DPA10103-DPB11601 DPA10103-DPB11901 DPA10103-DPB13101 DPA10103-DPB15001 DPA10103-DPB15501 DPA10104-DPB10101 DPA10105-DPB10101 DPA10105-DPB15001 DPA10201-DPB10501 DPA10201-DPB110601 DPA10201-DPB11601 DPA10201-DPB11901 DPA10201-DPB15501 DPA10202-DPB10501 DPA10202-DPB110601 DPA10202-DPB11901 DPA10202-DPB13801 DPA10202-DPB15501 DPA10301-DPB110601 DPA10301-DPB11101 DPA10301-DPB11301 DPA10301-DPB15501 DPA10401-DPB10101 DPA10401-DPB10402 DPA10401-DPB10501 DPA10401-DPB110501 DPA10401-DPB14901
KEPPRLWTGIELLPDKWTVQ

SEQ ID NO: 7507 - protein, 20 aa, synthetic construct
  source 1..20: note = Seed: KEPPFLWMGYELHPDKWTVQ; note = HLAs: DRB1_0101 DRB1_1001 DPA10103-DPB10201 DPA10103-DPB10202 DPA10103-DPB10401 DPA10103-DPB10501 DPA10103-DPB112601 DPA10103-DPB11501 DPA10103-DPB11601 DPA10103-DPB11801 DPA10103-DPB11901 DPA10103-DPB12301 DPA10103-DPB13401 DPA10103-DPB13901 DPA10103-DPB14001 DPA10103-DPB14101 DPA10103-DPB14801 DPA10103-DPB15501 DPA10103-DPB15901 DPA10104-DPB11501 DPA10105-DPB10401 DPA10105-DPB11801 DPA10106-DPB10101 DPA10201-DPB10101 DPA10201-DPB10201 DPA10201-DPB10202 DPA10201-DPB10501 DPA10201-DPB110601 DPA10201-DPB11501 DPA10201-DPB11601 DPA10201-DPB11901 DPA10201-DPB15501 DPA10202-DPB10101 DPA10202-DPB10201 DPA10202-DPB10202 DPA10202-DPB10401 DPA10202-DPB10501 DPA10202-DPB110601 DPA10202-DPB11101 DPA10202-DPB11301 DPA10202-DPB11801 DPA10202-DPB11901 DPA10202-DPB13101 DPA10202-DPB13801 DPA10202-DPB15501 DPA10202-DPB16501 DPA10301-DPB10101 DPA10301-DPB10201 DPA10301-DPB10202 DPA10301-DPB10401 DPA10301-DPB10402 DPA10301-DPB110501 DPA10301-DPB110601 DPA10301-DPB11101 DPA10301-DPB11301; note = HLAs: DPA10301-DPB11801 DPA10301-DPB12301 DPA10301-DPB13901 DPA10301-DPB14001 DPA10301-DPB14901 DPA10301-DPB15501 DPA10301-DPB16501 DPA10301-DPB17501 DPA10301-DPB18001 DPA10401-DPB10201 DPA10401-DPB10202 DPA10401-DPB10402 DPA10401-DPB110501 DPA10401-DPB14901
KEPPLLWIGAELLPDKWTVQ

SEQ ID NO: 7508 - protein, 20 aa, synthetic construct
  source 1..20: note = Seed: KEPPFLWMGYELHPDKWTVQ; note = HLAs: DPA10103-DPB10101 DPA10103-DPB10201 DPA10103-DPB10202 DPA10103-DPB10401 DPA10103-DPB10402 DPA10103-DPB10501 DPA10103-DPB110501 DPA10103-DPB112601 DPA10103-DPB11501 DPA10103-DPB11601 DPA10103-DPB11801 DPA10103-DPB11901 DPA10103-DPB12301 DPA10103-DPB13101 DPA10103-DPB13401 DPA10103-DPB13901 DPA10103-DPB14001 DPA10103-DPB14101 DPA10103-DPB14801 DPA10103-DPB14901 DPA10103-DPB15101 DPA10103-DPB15501 DPA10103-DPB15901 DPA10103-DPB18001 DPA10104-DPB10101 DPA10104-DPB11501 DPA10105-DPB10101 DPA10105-DPB10401 DPA10105-DPB11801 DPA10106-DPB10101 DPA10201-DPB10101 DPA10201-DPB10201 DPA10201-DPB10202 DPA10201-DPB10401 DPA10201-DPB10501 DPA10201-DPB110601 DPA10201-DPB11501 DPA10201-DPB11601 DPA10201-DPB11901 DPA10201-DPB13401 DPA10201-DPB15501 DPA10202-DPB10101 DPA10202-DPB10201 DPA10202-DPB10202 DPA10202-DPB10401 DPA10202-DPB10501 DPA10202-DPB110601 DPA10202-DPB11301 DPA10202-DPB11801 DPA10202-DPB11901 DPA10202-DPB13101 DPA10202-DPB13801 DPA10202-DPB15501 DPA10202-DPB16501 DPA10301-DPB10101; note = HLAs: DPA10301-DPB10201 DPA10301-DPB10202 DPA10301-DPB10401 DPA10301-DPB10402 DPA10301-DPB110501 DPA10301-DPB110601 DPA10301-DPB11101 DPA10301-DPB12301 DPA10301-DPB13901 DPA10301-DPB14001 DPA10301-DPB14901 DPA10301-DPB15501 DPA10301-DPB16501 DPA10301-DPB17501 DPA10301-DPB18001 DPA10401-DPB10101 DPA10401-DPB10201 DPA10401-DPB10202 DPA10401-DPB10402 DPA10401-DPB10501 DPA10401-DPB110501 DPA10401-DPB14901
KEPPFLWWGWELFPDKWTVQ

SEQ ID NO: 7509 - protein, 20 aa, synthetic construct
  source 1..20: note = Seed: KEPPFLWMGYELHPDKWTVQ; note = HLAs: DRB1_0101 DPA10103-DPB10101 DPA10103-DPB10201 DPA10103-DPB10202 DPA10103-DPB10401 DPA10103-DPB10402 DPA10103-DPB10501 DPA10103-DPB110501 DPA10103-DPB112601 DPA10103-DPB11501 DPA10103-DPB11601 DPA10103-DPB11801 DPA10103-DPB11901 DPA10103-DPB12301 DPA10103-DPB13101 DPA10103-DPB13401 DPA10103-DPB13901 DPA10103-DPB14001 DPA10103-DPB14101 DPA10103-DPB14801 DPA10103-DPB14901 DPA10103-DPB15001 DPA10103-DPB15101 DPA10103-DPB15501 DPA10103-DPB15901 DPA10103-DPB18001 DPA10104-DPB10101 DPA10104-DPB11501 DPA10105-DPB10101 DPA10105-DPB10401 DPA10105-DPB11801 DPA10105-DPB15001 DPA10106-DPB10101 DPA10201-DPB10101 DPA10201-DPB10201 DPA10201-DPB10202 DPA10201-DPB10401 DPA10201-DPB110601 DPA10201-DPB11501 DPA10201-DPB11601 DPA10201-DPB11901 DPA10201-DPB13401 DPA10201-DPB15501 DPA10202-DPB10101 DPA10202-DPB10201 DPA10202-DPB10202 DPA10202-DPB10401 DPA10202-DPB10501 DPA10202-DPB110601 DPA10202-DPB11301 DPA10202-DPB11801 DPA10202-DPB11901 DPA10202-DPB13101 DPA10202-DPB13801 DPA10202-DPB15501; note = HLAs: DPA10202-DPB16501 DPA10301-DPB10101 DPA10301-DPB10201 DPA10301-DPB10202 DPA10301-DPB10401 DPA10301-DPB10402 DPA10301-DPB110501 DPA10301-DPB110601 DPA10301-DPB11101 DPA10301-DPB11301 DPA10301-DPB11801 DPA10301-DPB12301 DPA10301-DPB13901 DPA10301-DPB14001 DPA10301-DPB14901 DPA10301-DPB15501 DPA10301-DPB16501 DPA10301-DPB17501 DPA10301-DPB18001 DPA10401-DPB10101 DPA10401-DPB10201 DPA10401-DPB10202 DPA10401-DPB10402 DPA10401-DPB10501 DPA10401-DPB110501 DPA10401-DPB14901
KEPPYLWQGWELVPDKWTVQ

SEQ ID NO: 7510 - protein, 20 aa, synthetic construct
  source 1..20: note = Seed: KEPPFLWMGYELHPDKWTVQ; note = HLAs: DRB1_1001 DPA10103-DPB10101 DPA10103-DPB10201 DPA10103-DPB10202 DPA10103-DPB10401 DPA10103-DPB10402 DPA10103-DPB10501 DPA10103-DPB110501 DPA10103-DPB112601 DPA10103-DPB11501 DPA10103-DPB11601 DPA10103-DPB11801 DPA10103-DPB11901 DPA10103-DPB12301 DPA10103-DPB13101 DPA10103-DPB13401 DPA10103-DPB13901 DPA10103-DPB14001 DPA10103-DPB14101 DPA10103-DPB14801 DPA10103-DPB14901 DPA10103-DPB15001 DPA10103-DPB15101 DPA10103-DPB15501 DPA10103-DPB15901 DPA10103-DPB18001 DPA10104-DPB10101 DPA10104-DPB11501 DPA10105-DPB10101 DPA10105-DPB10401 DPA10105-DPB11801 DPA10105-DPB15001 DPA10106-DPB10101 DPA10201-DPB10101 DPA10201-DPB10201 DPA10201-DPB10202 DPA10201-DPB10401 DPA10201-DPB10501 DPA10201-DPB110601 DPA10201-DPB11501 DPA10201-DPB11601 DPA10201-DPB11901 DPA10201-DPB13401 DPA10201-DPB15501 DPA10202-DPB10101 DPA10202-DPB10201 DPA10202-DPB10202 DPA10202-DPB10401 DPA10202-DPB10501 DPA10202-DPB110601 DPA10202-DPB11301 DPA10202-DPB11801 DPA10202-DPB11901 DPA10202-DPB13101 DPA10202-DPB13801; note = HLAs: DPA10202-DPB15501 DPA10202-DPB16501 DPA10301-DPB10101 DPA10301-DPB10201 DPA10301-DPB10202 DPA10301-DPB10401 DPA10301-DPB10402 DPA10301-DPB110501 DPA10301-DPB110601 DPA10301-DPB11101 DPA10301-DPB11801 DPA10301-DPB12301 DPA10301-DPB13901 DPA10301-DPB14001 DPA10301-DPB14901 DPA10301-DPB15501 DPA10301-DPB16501 DPA10301-DPB17501 DPA10301-DPB18001 DPA10401-DPB10101 DPA10401-DPB10201 DPA10401-DPB10202 DPA10401-DPB10402 DPA10401-DPB10501 DPA10401-DPB110501 DPA10401-DPB14901
KEPPLLWTGYELSPDKWTVQ

SEQ ID NO: 7511 - protein, 20 aa, synthetic construct
  source 1..20: note = Seed: KEPPFLWMGYELHPDKWTVQ; note = HLAs: DRB1_0101 DRB1_0405 DRB1_1001 DPA10103-DPB10101 DPA10103-DPB10201 DPA10103-DPB10202 DPA10103-DPB10401 DPA10103-DPB10501 DPA10103-DPB112601 DPA10103-DPB11501 DPA10103-DPB11601 DPA10103-DPB11801 DPA10103-DPB11901 DPA10103-DPB12301 DPA10103-DPB13101 DPA10103-DPB13401 DPA10103-DPB13901 DPA10103-DPB14001 DPA10103-DPB14101 DPA10103-DPB14801 DPA10103-DPB15001 DPA10103-DPB15901 DPA10104-DPB10101 DPA10104-DPB11501 DPA10105-DPB10101 DPA10105-DPB10401 DPA10105-DPB11801 DPA10105-DPB15001 DPA10106-DPB10101 DPA10201-DPB10101 DPA10201-DPB10202 DPA10201-DPB10501 DPA10201-DPB110601 DPA10201-DPB11501 DPA10201-DPB11601 DPA10201-DPB11901 DPA10201-DPB15501 DPA10202-DPB10101 DPA10202-DPB10201 DPA10202-DPB10202 DPA10202-DPB10501 DPA10202-DPB110601 DPA10202-DPB11801 DPA10202-DPB11901 DPA10202-DPB13101 DPA10202-DPB13801 DPA10202-DPB16501 DPA10301-DPB10201 DPA10301-DPB10202 DPA10301-DPB10401 DPA10301-DPB10402 DPA10301-DPB110501 DPA10301-DPB110601 DPA10301-DPB11101 DPA10301-DPB11301 DPA10301-DPB11801; note = HLAs: DPA10301-DPB12301 DPA10301-DPB13901 DPA10301-DPB14001 DPA10301-DPB14901 DPA10301-DPB15501 DPA10301-DPB16501 DPA10301-DPB17501 DPA10301-DPB18001 DPA10401-DPB10101 DPA10401-DPB10201 DPA10401-DPB10202 DPA10401-DPB10402 DPA10401-DPB10501 DPA10401-DPB110501 DPA10401-DPB14901
KEPPFLWQGIELAPDKWTVQ

SEQ ID NO: 7512 - protein, 20 aa, synthetic construct
  source 1..20: note = Seed: KEPPFLWMGYELHPDKWTVQ; note = HLAs: DPA10103-DPB10101 DPA10103-DPB10201 DPA10103-DPB10202 DPA10103-DPB10401 DPA10103-DPB10402 DPA10103-DPB10501 DPA10103-DPB110501 DPA10103-DPB112601 DPA10103-DPB11501 DPA10103-DPB11601 DPA10103-DPB11801 DPA10103-DPB11901 DPA10103-DPB12301 DPA10103-DPB13101 DPA10103-DPB13401 DPA10103-DPB13901 DPA10103-DPB14001 DPA10103-DPB14101 DPA10103-DPB14801 DPA10103-DPB14901 DPA10103-DPB15001 DPA10103-DPB15101 DPA10103-DPB15501 DPA10103-DPB15901 DPA10103-DPB18001 DPA10104-DPB10101 DPA10104-DPB11501 DPA10105-DPB10101 DPA10105-DPB10401 DPA10105-DPB11801 DPA10105-DPB15001 DPA10106-DPB10101 DPA10201-DPB10101 DPA10201-DPB10201 DPA10201-DPB10202 DPA10201-DPB10501 DPA10201-DPB110601 DPA10201-DPB11501 DPA10201-DPB11601 DPA10201-DPB11901 DPA10201-DPB13401 DPA10201-DPB15501 DPA10202-DPB10101 DPA10202-DPB10201 DPA10202-DPB10202 DPA10202-DPB10401 DPA10202-DPB10501 DPA10202-DPB110601 DPA10202-DPB11301 DPA10202-DPB11801 DPA10202-DPB11901 DPA10202-DPB13101 DPA10202-DPB13801 DPA10202-DPB15501 DPA10202-DPB16501; note = HLAs: DPA10301-DPB10101 DPA10301-DPB10201 DPA10301-DPB10202 DPA10301-DPB10401 DPA10301-DPB10402 DPA10301-DPB110501 DPA10301-DPB110601 DPA10301-DPB11101 DPA10301-DPB11301 DPA10301-DPB11801 DPA10301-DPB12301 DPA10301-DPB13901 DPA10301-DPB14001 DPA10301-DPB14901 DPA10301-DPB15501 DPA10301-DPB16501 DPA10301-DPB17501 DPA10301-DPB18001 DPA10401-DPB10101 DPA10401-DPB10201 DPA10401-DPB10202 DPA10401-DPB10402 DPA10401-DPB10501 DPA10401-DPB110501 DPA10401-DPB14901
KEPPFLWHGMELAPDKWTVQ

SEQ ID NO: 7513 - protein, 20 aa, synthetic construct
  source 1..20: note = Seed: KEPPFLWMGYELHPDKWTVQ; note = HLAs: DRB1_0101 DRB1_0405 DRB1_1001 DPA10103-DPB10101 DPA10103-DPB10201 DPA10103-DPB10202 DPA10103-DPB10401 DPA10103-DPB10402 DPA10103-DPB10501 DPA10103-DPB110501 DPA10103-DPB112601 DPA10103-DPB11501 DPA10103-DPB11601 DPA10103-DPB11801 DPA10103-DPB11901 DPA10103-DPB12301 DPA10103-DPB13101 DPA10103-DPB13401 DPA10103-DPB13901 DPA10103-DPB14001 DPA10103-DPB14101 DPA10103-DPB14801 DPA10103-DPB14901 DPA10103-DPB15001 DPA10103-DPB15101 DPA10103-DPB15501 DPA10103-DPB15901 DPA10103-DPB18001 DPA10104-DPB10101 DPA10104-DPB11501 DPA10105-DPB10101 DPA10105-DPB10401 DPA10105-DPB11801 DPA10105-DPB15001 DPA10106-DPB10101 DPA10201-DPB10101 DPA10201-DPB10201 DPA10201-DPB10202 DPA10201-DPB10401 DPA10201-DPB10501 DPA10201-DPB110601 DPA10201-DPB11501 DPA10201-DPB11601 DPA10201-DPB11901 DPA10201-DPB13401 DPA10201-DPB15501 DPA10202-DPB10101 DPA10202-DPB10201 DPA10202-DPB10202 DPA10202-DPB10401 DPA10202-DPB10501 DPA10202-DPB110601 DPA10202-DPB11101 DPA10202-DPB11301 DPA10202-DPB11801 DPA10202-DPB11901; note = HLAs: DPA10202-DPB13101 DPA10202-DPB13801 DPA10202-DPB15501 DPA10202-DPB16501 DPA10301-DPB10101 DPA10301-DPB10201 DPA10301-DPB10202 DPA10301-DPB10401 DPA10301-DPB10402 DPA10301-DPB110501 DPA10301-DPB110601 DPA10301-DPB11101 DPA10301-DPB11301 DPA10301-DPB11801 DPA10301-DPB12301 DPA10301-DPB13901 DPA10301-DPB14001 DPA10301-DPB14901 DPA10301-DPB15501 DPA10301-DPB16501 DPA10301-DPB17501 DPA10301-DPB18001 DPA10401-DPB10101 DPA10401-DPB10201 DPA10401-DPB10202 DPA10401-DPB10402 DPA10401-DPB10501 DPA10401-DPB110501 DPA10401-DPB14901
KEPPFLWDGIELVPDKWTVQ

SEQ ID NO: 7514 - protein, 20 aa, synthetic construct
  source 1..20: note = Seed: KEPPFLWMGYELHPDKWTVQ; note = HLAs: DPA10103-DPB10101 DPA10103-DPB10201 DPA10103-DPB10202 DPA10103-DPB10401 DPA10103-DPB10402 DPA10103-DPB10501 DPA10103-DPB110501 DPA10103-DPB112601 DPA10103-DPB11501 DPA10103-DPB11601 DPA10103-DPB11801 DPA10103-DPB11901 DPA10103-DPB12301 DPA10103-DPB13101 DPA10103-DPB13401 DPA10103-DPB13901 DPA10103-DPB14001 DPA10103-DPB14101 DPA10103-DPB14801 DPA10103-DPB14901 DPA10103-DPB15001 DPA10103-DPB15101 DPA10103-DPB15501 DPA10103-DPB15901 DPA10103-DPB18001 DPA10104-DPB10101 DPA10104-DPB11501 DPA10105-DPB10101 DPA10105-DPB10401 DPA10105-DPB11801 DPA10105-DPB15001 DPA10106-DPB10101 DPA10201-DPB10101 DPA10201-DPB10201 DPA10201-DPB10202 DPA10201-DPB10401 DPA10201-DPB10501 DPA10201-DPB110601 DPA10201-DPB11501 DPA10201-DPB11601 DPA10201-DPB11901 DPA10201-DPB13401 DPA10202-DPB10101 DPA10202-DPB10201 DPA10202-DPB10202 DPA10202-DPB10401 DPA10202-DPB10501 DPA10202-DPB110601 DPA10202-DPB11301 DPA10202-DPB11801 DPA10202-DPB11901 DPA10202-DPB13101 DPA10202-DPB13801 DPA10202-DPB15501 DPA10202-DPB16501; note = HLAs: DPA10301-DPB10101 DPA10301-DPB10201 DPA10301-DPB10202 DPA10301-DPB10401 DPA10301-DPB10402 DPA10301-DPB110501 DPA10301-DPB110601 DPA10301-DPB11801 DPA10301-DPB12301 DPA10301-DPB13901 DPA10301-DPB14001 DPA10301-DPB14901 DPA10301-DPB16501 DPA10301-DPB17501 DPA10301-DPB18001 DPA10401-DPB10101 DPA10401-DPB10201 DPA10401-DPB10202 DPA10401-DPB10402 DPA10401-DPB10501 DPA10401-DPB110501 DPA10401-DPB14901
KEPPLLWEGFELQPDKWTVQ

SEQ ID NO: 7515 - protein, 20 aa, synthetic construct
  source 1..20: note = Seed: KEPPFLWMGYELHPDKWTVQ; note = HLAs: DPA10103-DPB10101 DPA10103-DPB10201 DPA10103-DPB10202 DPA10103-DPB10401 DPA10103-DPB10402 DPA10103-DPB10501 DPA10103-DPB110501 DPA10103-DPB112601 DPA10103-DPB11501 DPA10103-DPB11601 DPA10103-DPB11801 DPA10103-DPB11901 DPA10103-DPB12301 DPA10103-DPB13101 DPA10103-DPB13401 DPA10103-DPB13901 DPA10103-DPB14001 DPA10103-DPB14101 DPA10103-DPB14801 DPA10103-DPB14901 DPA10103-DPB15001 DPA10103-DPB15101 DPA10103-DPB15501 DPA10103-DPB15901 DPA10103-DPB18001 DPA10104-DPB10101 DPA10104-DPB11501 DPA10105-DPB10101 DPA10105-DPB10401 DPA10105-DPB11801 DPA10105-DPB15001 DPA10106-DPB10101 DPA10201-DPB10101 DPA10201-DPB10201 DPA10201-DPB10202 DPA10201-DPB110601 DPA10201-DPB11501 DPA10201-DPB11601 DPA10201-DPB11901 DPA10201-DPB13401 DPA10201-DPB15501 DPA10202-DPB10101 DPA10202-DPB10201 DPA10202-DPB10202 DPA10202-DPB10401 DPA10202-DPB10501 DPA10202-DPB110601 DPA10202-DPB11301 DPA10202-DPB11801 DPA10202-DPB11901 DPA10202-DPB13101 DPA10202-DPB13801 DPA10202-DPB15501 DPA10202-DPB16501 DPA10301-DPB10101; note = HLAs: DPA10301-DPB10201 DPA10301-DPB10202 DPA10301-DPB10401 DPA10301-DPB10402 DPA10301-DPB110501 DPA10301-DPB110601 DPA10301-DPB11301 DPA10301-DPB11801 DPA10301-DPB12301 DPA10301-DPB13901 DPA10301-DPB14001 DPA10301-DPB14901 DPA10301-DPB15501 DPA10301-DPB16501 DPA10301-DPB17501 DPA10301-DPB18001 DPA10401-DPB10101 DPA10401-DPB10201 DPA10401-DPB10202 DPA10401-DPB10402 DPA10401-DPB10501 DPA10401-DPB110501 DPA10401-DPB14901
KEPPMLWNGFELAPDKWTVQ

SEQ ID NO: 7516 - protein, 20 aa, synthetic construct
  source 1..20: note = Seed: KEPPFLWMGYELHPDKWTVQ; note = HLAs: DRB1_0101 DRB1_0405 DRB1_1001 DPA10103-DPB10201 DPA10103-DPB10202 DPA10103-DPB10401 DPA10103-DPB10501 DPA10103-DPB112601 DPA10103-DPB11501 DPA10103-DPB11601 DPA10103-DPB11801 DPA10103-DPB11901 DPA10103-DPB12301 DPA10103-DPB13401 DPA10103-DPB13901 DPA10103-DPB14001 DPA10103-DPB14101 DPA10103-DPB14801 DPA10103-DPB15901 DPA10104-DPB11501 DPA10105-DPB10401 DPA10105-DPB11801 DPA10106-DPB10101 DPA10201-DPB10101 DPA10201-DPB10201 DPA10201-DPB10202 DPA10201-DPB10401 DPA10201-DPB10501 DPA10201-DPB110601 DPA10201-DPB11501 DPA10201-DPB11601 DPA10201-DPB11901 DPA10201-DPB13401 DPA10201-DPB15501 DPA10202-DPB10201 DPA10202-DPB10202 DPA10202-DPB10501 DPA10202-DPB110601 DPA10202-DPB11801 DPA10202-DPB11901 DPA10202-DPB13801 DPA10301-DPB10201 DPA10301-DPB10202 DPA10301-DPB10402 DPA10301-DPB110501 DPA10301-DPB110601 DPA10301-DPB11301 DPA10301-DPB11801 DPA10301-DPB14001 DPA10301-DPB14901 DPA10301-DPB17501 DPA10301-DPB18001 DPA10401-DPB10201 DPA10401-DPB10202 DPA10401-DPB10402 DPA10401-DPB110501; note = HLAs: DPA10401-DPB14901
KEPPFLWYGIELAPDKWTVQ

SEQ ID NO: 7517 - protein, 20 aa, synthetic construct
  source 1..20: note = Seed: KEPPFLWMGYELHPDKWTVQ; note = HLAs: DRB1_0101 DRB1_1001 DPA10103-DPB11501 DPA10103-DPB13401 DPA10104-DPB11501 DPA10106-DPB10101 DPA10201-DPB10101 DPA10201-DPB10401 DPA10201-DPB11601 DPA10202-DPB10101 DPA10202-DPB110601 DPA10202-DPB11801 DPA10202-DPB11901 DPA10301-DPB10202 DPA10301-DPB11801 DPA10301-DPB14001 DPA10401-DPB10402 DPA10401-DPB110501 DPA10401-DPB14901
KEPPMLWLGIELLPDKWTVQ

SEQ ID NO: 7518 - protein, 14 aa, synthetic construct
  source 1..14: note = Seed: PPFLWMGYELHPDK; note = HLAs: DPA10103-DPB10101 DPA10103-DPB10201 DPA10103-DPB10202 DPA10103-DPB10401 DPA10103-DPB112601 DPA10103-DPB11501 DPA10103-DPB11601 DPA10103-DPB11901 DPA10103-DPB12301 DPA10103-DPB13101 DPA10103-DPB13401 DPA10103-DPB13901 DPA10103-DPB14001 DPA10103-DPB14101 DPA10103-DPB14801 DPA10103-DPB15001 DPA10103-DPB15901 DPA10104-DPB10101 DPA10104-DPB11501 DPA10105-DPB10101 DPA10105-DPB10401 DPA10105-DPB15001 DPA10106-DPB10101 DPA10201-DPB10101 DPA10201-DPB110601 DPA10201-DPB11501 DPA10201-DPB11601 DPA10201-DPB11901 DPA10202-DPB10101 DPA10202-DPB10201 DPA10202-DPB10202 DPA10202-DPB10401 DPA10202-DPB110601 DPA10202-DPB11901 DPA10202-DPB13101 DPA10202-DPB16501 DPA10301-DPB10101 DPA10301-DPB10201 DPA10301-DPB10202 DPA10301-DPB10401 DPA10301-DPB10402 DPA10301-DPB110501 DPA10301-DPB110601 DPA10301-DPB11801 DPA10301-DPB12301 DPA10301-DPB13901 DPA10301-DPB14001 DPA10301-DPB14901 DPA10301-DPB15501 DPA10301-DPB16501 DPA10301-DPB17501 DPA10301-DPB18001 DPA10401-DPB10101 DPA10401-DPB10201; note = HLAs: DPA10401-DPB10202 DPA10401-DPB10402 DPA10401-DPB10501 DPA10401-DPB110501 DPA10401-DPB14901
PPFLWKGMELIPDK

SEQ ID NO: 7519 - protein, 20 aa, synthetic construct
  source 1..20: note = Seed: KEPPFLWMGYELHPDKWTVQ; note = HLAs: DPA10103-DPB10101 DPA10103-DPB10201 DPA10103-DPB10202 DPA10103-DPB10401 DPA10103-DPB10402 DPA10103-DPB10501 DPA10103-DPB110501 DPA10103-DPB112601 DPA10103-DPB11501 DPA10103-DPB11601 DPA10103-DPB11801 DPA10103-DPB11901 DPA10103-DPB12301 DPA10103-DPB13101 DPA10103-DPB13401 DPA10103-DPB13901 DPA10103-DPB14001 DPA10103-DPB14101 DPA10103-DPB14801 DPA10103-DPB14901 DPA10103-DPB15001 DPA10103-DPB15101 DPA10103-DPB15501 DPA10103-DPB15901 DPA10103-DPB18001 DPA10104-DPB10101 DPA10104-DPB11501 DPA10105-DPB10101 DPA10105-DPB10401 DPA10105-DPB11801 DPA10105-DPB15001 DPA10106-DPB10101 DPA10201-DPB10101 DPA10201-DPB10201 DPA10201-DPB10202 DPA10201-DPB10401 DPA10201-DPB10501 DPA10201-DPB110601 DPA10201-DPB11501 DPA10201-DPB11601 DPA10201-DPB11901 DPA10201-DPB13401 DPA10201-DPB15501 DPA10202-DPB10101 DPA10202-DPB10201 DPA10202-DPB10202 DPA10202-DPB10401 DPA10202-DPB10501 DPA10202-DPB110601 DPA10202-DPB11301 DPA10202-DPB11801 DPA10202-DPB11901 DPA10202-DPB13101 DPA10202-DPB13801 DPA10202-DPB15501; note = HLAs: DPA10202-DPB16501 DPA10301-DPB10101 DPA10301-DPB10201 DPA10301-DPB10202 DPA10301-DPB10401 DPA10301-DPB10402 DPA10301-DPB110501 DPA10301-DPB110601 DPA10301-DPB11301 DPA10301-DPB11801 DPA10301-DPB12301 DPA10301-DPB13901 DPA10301-DPB14001 DPA10301-DPB14901 DPA10301-DPB15501 DPA10301-DPB16501 DPA10301-DPB17501 DPA10301-DPB18001 DPA10401-DPB10101 DPA10401-DPB10201 DPA10401-DPB10202 DPA10401-DPB10402 DPA10401-DPB10501 DPA10401-DPB110501 DPA10401-DPB14901
KEPPMLWHGFELYPDKWTVQ

SEQ ID NO: 7520 - protein, 20 aa, synthetic construct
  source 1..20: note = Seed: KEPPFLWMGYELHPDKWTVQ; note = HLAs: DPA10103-DPB10101 DPA10103-DPB10201 DPA10103-DPB10202 DPA10103-DPB10401 DPA10103-DPB10402 DPA10103-DPB10501 DPA10103-DPB110501 DPA10103-DPB112601 DPA10103-DPB11501 DPA10103-DPB11601 DPA10103-DPB11801 DPA10103-DPB11901 DPA10103-DPB12301 DPA10103-DPB13101 DPA10103-DPB13401 DPA10103-DPB13901 DPA10103-DPB14001 DPA10103-DPB14101 DPA10103-DPB14801 DPA10103-DPB14901 DPA10103-DPB15001 DPA10103-DPB15101 DPA10103-DPB15501 DPA10103-DPB15901 DPA10103-DPB18001 DPA10104-DPB10101 DPA10104-DPB11501 DPA10105-DPB10101 DPA10105-DPB10401 DPA10105-DPB11801 DPA10105-DPB15001 DPA10106-DPB10101 DPA10201-DPB10101 DPA10201-DPB10201 DPA10201-DPB10202 DPA10201-DPB10401 DPA10201-DPB110601 DPA10201-DPB11501 DPA10201-DPB11601 DPA10201-DPB11901 DPA10201-DPB13401 DPA10201-DPB15501 DPA10202-DPB10101 DPA10202-DPB10201 DPA10202-DPB10202 DPA10202-DPB10401 DPA10202-DPB10501 DPA10202-DPB110601 DPA10202-DPB11301 DPA10202-DPB11901 DPA10202-DPB13101 DPA10202-DPB13801 DPA10202-DPB15501 DPA10202-DPB16501 DPA10301-DPB10101; note = HLAs: DPA10301-DPB10201 DPA10301-DPB10202 DPA10301-DPB10401 DPA10301-DPB10402 DPA10301-DPB110501 DPA10301-DPB110601 DPA10301-DPB11101 DPA10301-DPB11301 DPA10301-DPB11801 DPA10301-DPB12301 DPA10301-DPB13901 DPA10301-DPB14001 DPA10301-DPB14901 DPA10301-DPB15501 DPA10301-DPB16501 DPA10301-DPB17501 DPA10301-DPB18001 DPA10401-DPB10101 DPA10401-DPB10201 DPA10401-DPB10202 DPA10401-DPB10402 DPA10401-DPB10501 DPA10401-DPB110501 DPA10401-DPB14901
KEPPWLWHGFELEPDKWTVQ

SEQ ID NO: 7521 - protein, 20 aa, synthetic construct
  source 1..20: note = Seed: KEPPFLWMGYELHPDKWTVQ; note = HLAs: DRB1_1602 DQA10101-DQB10501 DQA10101-DQB10503 DQA10102-DQB10501 DQA10102-DQB10502 DQA10102-DQB10503 DQA10103-DQB10501 DQA10104-DQB10501 DQA10104-DQB10503 DQA10105-DQB10501 DQA10107-DQB10503 DQA10505-DQB10402
KEPPFLYMGFEAHPLKWTVQ

SEQ ID NO: 7522 - protein, 14 aa, synthetic construct
  source 1..14: note = Seed: PPFLWMGYELHPDK; note = HLAs: DRB1_1001 DPA10103-DPB10101 DPA10103-DPB10201 DPA10103-DPB10202 DPA10103-DPB10401 DPA10103-DPB112601 DPA10103-DPB11501 DPA10103-DPB11601 DPA10103-DPB11901 DPA10103-DPB12301 DPA10103-DPB13101 DPA10103-DPB13401 DPA10103-DPB13901 DPA10103-DPB14001 DPA10103-DPB14101 DPA10103-DPB14801 DPA10103-DPB15001 DPA10103-DPB15901 DPA10104-DPB10101 DPA10104-DPB11501 DPA10105-DPB10101 DPA10105-DPB10401 DPA10105-DPB15001 DPA10106-DPB10101 DPA10201-DPB10101 DPA10201-DPB110601 DPA10201-DPB11501 DPA10201-DPB11601 DPA10201-DPB11901 DPA10202-DPB10101 DPA10202-DPB10201 DPA10202-DPB10202 DPA10202-DPB10401 DPA10202-DPB110601 DPA10202-DPB11901 DPA10202-DPB13101 DPA10202-DPB16501 DPA10301-DPB10101 DPA10301-DPB10201 DPA10301-DPB10202 DPA10301-DPB10401 DPA10301-DPB10402 DPA10301-DPB110501 DPA10301-DPB110601 DPA10301-DPB11801 DPA10301-DPB12301 DPA10301-DPB13901 DPA10301-DPB14001 DPA10301-DPB14901 DPA10301-DPB15501 DPA10301-DPB16501 DPA10301-DPB17501 DPA10301-DPB18001 DPA10401-DPB10101 DPA10401-DPB10201; note = HLAs: DPA10401-DPB10202 DPA10401-DPB10402 DPA10401-DPB10501 DPA10401-DPB110501 DPA10401-DPB14901
PPFLWLGLELAPDK

SEQ ID NO: 7523 - protein, 20 aa, synthetic construct
  source 1..20: note = Seed: KEPPFLWMGYELHPDKWTVQ; note = HLAs: DRB1_0101 DRB1_0405 DRB1_1001 DPA10201-DPB10201 DPA10201-DPB10202 DPA10201-DPB10501 DPA10201-DPB11501 DPA10201-DPB13401 DPA10202-DPB10101 DPA10202-DPB10202 DPA10202-DPB10501 DPA10202-DPB110601 DPA10202-DPB11101 DPA10202-DPB11801 DPA10202-DPB11901 DPA10202-DPB13801 DPA10202-DPB15501 DPA10202-DPB16501 DPA10301-DPB10201 DPA10301-DPB10202 DPA10301-DPB11801
KEPPYLWVGTELLPDKWTVQ

SEQ ID NO: 7524 - protein, 20 aa, synthetic construct
  source 1..20: note = Seed: KEPPFLWMGYELHPDKWTVQ; note = HLAs: DRB1_0101 DRB1_1001 DPA10103-DPB10202 DPA10103-DPB11501 DPA10103-DPB11601 DPA10103-DPB11801 DPA10103-DPB11901 DPA10103-DPB13401 DPA10103-DPB14001 DPA10103-DPB15901 DPA10104-DPB11501 DPA10105-DPB11801 DPA10106-DPB10101 DPA10201-DPB10101 DPA10201-DPB10201 DPA10201-DPB10401 DPA10201-DPB10501 DPA10201-DPB110601 DPA10201-DPB11501 DPA10201-DPB11601 DPA10201-DPB11901 DPA10201-DPB13401 DPA10202-DPB10101 DPA10202-DPB10201 DPA10202-DPB10501 DPA10202-DPB110601 DPA10202-DPB11801 DPA10202-DPB11901 DPA10202-DPB13801 DPA10301-DPB10201 DPA10301-DPB10202 DPA10301-DPB10402 DPA10301-DPB110501 DPA10301-DPB110601 DPA10301-DPB11801 DPA10301-DPB14001 DPA10301-DPB14901 DPA10301-DPB16501 DPA10301-DPB17501 DPA10301-DPB18001 DPA10401-DPB10201 DPA10401-DPB10202 DPA10401-DPB10402 DPA10401-DPB110501 DPA10401-DPB14901
KEPPLLWQGIELLPDKWTVQ

SEQ ID NO: 7525 - protein, 20 aa, synthetic construct
  source 1..20: note = Seed: KEPPFLWMGYELHPDKWTVQ; note = HLAs: DRB1_0101 DRB1_0405 DRB1_1001 DPA10103-DPB10101 DPA10103-DPB10201 DPA10103-DPB10202 DPA10103-DPB10401 DPA10103-DPB10501 DPA10103-DPB112601 DPA10103-DPB11501 DPA10103-DPB11601 DPA10103-DPB11801 DPA10103-DPB11901 DPA10103-DPB12301 DPA10103-DPB13101 DPA10103-DPB13401 DPA10103-DPB13901 DPA10103-DPB14001 DPA10103-DPB14101 DPA10103-DPB14801 DPA10103-DPB15001 DPA10103-DPB15501 DPA10103-DPB15901 DPA10104-DPB10101 DPA10104-DPB11501 DPA10105-DPB10101 DPA10105-DPB10401 DPA10105-DPB11801 DPA10105-DPB15001 DPA10106-DPB10101 DPA10201-DPB10101 DPA10201-DPB10201 DPA10201-DPB10202 DPA10201-DPB10401 DPA10201-DPB10501 DPA10201-DPB110601 DPA10201-DPB11501 DPA10201-DPB11601 DPA10201-DPB11901 DPA10201-DPB13401 DPA10201-DPB15501 DPA10202-DPB10101 DPA10202-DPB10201 DPA10202-DPB10202 DPA10202-DPB10401 DPA10202-DPB10501 DPA10202-DPB110601 DPA10202-DPB11101 DPA10202-DPB11301 DPA10202-DPB11801 DPA10202-DPB11901 DPA10202-DPB13101 DPA10202-DPB13801 DPA10202-DPB15501 DPA10202-DPB16501 DPA10301-DPB10101; note = HLAs: DPA10301-DPB10201 DPA10301-DPB10202 DPA10301-DPB10401 DPA10301-DPB10402 DPA10301-DPB110501 DPA10301-DPB110601 DPA10301-DPB11101 DPA10301-DPB11301 DPA10301-DPB11801 DPA10301-DPB12301 DPA10301-DPB13901 DPA10301-DPB14001 DPA10301-DPB14901 DPA10301-DPB15501 DPA10301-DPB16501 DPA10301-DPB17501 DPA10301-DPB18001 DPA10401-DPB10101 DPA10401-DPB10201 DPA10401-DPB10202 DPA10401-DPB10402 DPA10401-DPB10501 DPA10401-DPB110501 DPA10401-DPB14901
KEPPFLWLGPELLPDKWTVQ

SEQ ID NO: 7526 - protein, 20 aa, synthetic construct
  source 1..20: note = Seed: KEPPFLWMGYELHPDKWTVQ; note = HLAs: DRB1_0101 DRB1_0405 DRB1_1001 DPA10103-DPB10401 DPA10103-DPB112601 DPA10103-DPB11501 DPA10103-DPB11801 DPA10103-DPB12301 DPA10103-DPB13401 DPA10103-DPB13901 DPA10103-DPB14001 DPA10103-DPB15901 DPA10104-DPB11501 DPA10105-DPB10401 DPA10105-DPB11801 DPA10106-DPB10101 DPA10201-DPB10101 DPA10201-DPB10201 DPA10201-DPB10202 DPA10201-DPB10401 DPA10201-DPB10501 DPA10201-DPB110601 DPA10201-DPB11501 DPA10201-DPB11601 DPA10201-DPB11901 DPA10201-DPB13401 DPA10202-DPB10101 DPA10202-DPB10201 DPA10202-DPB10202 DPA10202-DPB10401 DPA10202-DPB10501 DPA10202-DPB110601 DPA10202-DPB11101 DPA10202-DPB11801 DPA10202-DPB11901 DPA10202-DPB13101 DPA10202-DPB13801 DPA10202-DPB16501 DPA10301-DPB10201 DPA10301-DPB10202 DPA10301-DPB10401 DPA10301-DPB110601 DPA10301-DPB11301 DPA10301-DPB11801 DPA10301-DPB12301 DPA10301-DPB13901 DPA10301-DPB14001 DPA10301-DPB15501 DPA10401-DPB10402 DPA10401-DPB110501 DPA10401-DPB14901
KEPPFLWIGEELLPDKWTVQ

SEQ ID NO: 7527 - protein, 20 aa, synthetic construct
  source 1..20: note = Seed: KEPPFLWMGYELHPDKWTVQ; note = HLAs: DPA10103-DPB10101 DPA10103-DPB10401 DPA10103-DPB10501 DPA10103-DPB112601 DPA10103-DPB11501 DPA10103-DPB11601 DPA10103-DPB11901 DPA10103-DPB12301 DPA10103-DPB13101 DPA10103-DPB13401 DPA10103-DPB13901 DPA10103-DPB14001 DPA10104-DPB10101 DPA10104-DPB11501 DPA10105-DPB10101 DPA10105-DPB10401 DPA10106-DPB10101 DPA10201-DPB10101 DPA10201-DPB10501 DPA10201-DPB110601 DPA10201-DPB11601 DPA10201-DPB11901 DPA10201-DPB13401 DPA10201-DPB15501 DPA10202-DPB10101 DPA10202-DPB10401 DPA10202-DPB10501 DPA10202-DPB110601 DPA10202-DPB11801 DPA10202-DPB11901 DPA10202-DPB13101 DPA10202-DPB13801 DPA10202-DPB15501 DPA10202-DPB16501 DPA10301-DPB110601 DPA10301-DPB14001 DPA10301-DPB16501 DPA10401-DPB10101 DPA10401-DPB10501
KEPPQLWIGFELFPDKWTVQ

SEQ ID NO: 7528 - protein, 20 aa, synthetic construct
  source 1..20: note = Seed: KEPPFLWMGYELHPDKWTVQ; note = HLAs: DPA10103-DPB10101 DPA10103-DPB10201 DPA10103-DPB10202 DPA10103-DPB10401 DPA10103-DPB10402 DPA10103-DPB10501 DPA10103-DPB110501 DPA10103-DPB112601 DPA10103-DPB11501 DPA10103-DPB11601 DPA10103-DPB11801 DPA10103-DPB11901 DPA10103-DPB12301 DPA10103-DPB13101 DPA10103-DPB13401 DPA10103-DPB13901 DPA10103-DPB14001 DPA10103-DPB14101 DPA10103-DPB14801 DPA10103-DPB14901 DPA10103-DPB15001 DPA10103-DPB15101 DPA10103-DPB15501 DPA10103-DPB15901 DPA10103-DPB18001 DPA10104-DPB10101 DPA10104-DPB11501 DPA10105-DPB10101 DPA10105-DPB10401 DPA10105-DPB11801 DPA10105-DPB15001 DPA10106-DPB10101 DPA10201-DPB10101 DPA10201-DPB10201 DPA10201-DPB10202 DPA10201-DPB10401 DPA10201-DPB110601 DPA10201-DPB11501 DPA10201-DPB11601 DPA10201-DPB11901 DPA10201-DPB13401 DPA10201-DPB15501 DPA10202-DPB10101 DPA10202-DPB10201 DPA10202-DPB10202 DPA10202-DPB10401 DPA10202-DPB10501 DPA10202-DPB110601 DPA10202-DPB11301 DPA10202-DPB11801 DPA10202-DPB11901 DPA10202-DPB13101 DPA10202-DPB13801 DPA10202-DPB15501 DPA10202-DPB16501; note = HLAs: DPA10301-DPB10101 DPA10301-DPB10201 DPA10301-DPB10202 DPA10301-DPB10401 DPA10301-DPB10402 DPA10301-DPB110501 DPA10301-DPB110601 DPA10301-DPB11101 DPA10301-DPB11301 DPA10301-DPB11801 DPA10301-DPB12301 DPA10301-DPB13901 DPA10301-DPB14001 DPA10301-DPB14901 DPA10301-DPB15501 DPA10301-DPB16501 DPA10301-DPB17501 DPA10301-DPB18001 DPA10401-DPB10101 DPA10401-DPB10201 DPA10401-DPB10202 DPA10401-DPB10402 DPA10401-DPB10501 DPA10401-DPB110501 DPA10401-DPB14901
KEPPVLWSGWELVPDKWTVQ

SEQ ID NO: 7529 - protein, 20 aa, synthetic construct
  source 1..20: note = Seed: KEPPFLWMGYELHPDKWTVQ; note = HLAs: DPA10103-DPB10201 DPA10103-DPB10202 DPA10103-DPB10401 DPA10103-DPB112601 DPA10103-DPB11601 DPA10103-DPB11901 DPA10103-DPB12301 DPA10103-DPB13401 DPA10103-DPB13901 DPA10103-DPB14001 DPA10103-DPB14101 DPA10103-DPB14801 DPA10105-DPB10401 DPA10201-DPB10201 DPA10201-DPB10202 DPA10201-DPB10501 DPA10201-DPB110601 DPA10201-DPB11601 DPA10201-DPB11901 DPA10201-DPB13401 DPA10202-DPB10401 DPA10202-DPB10501 DPA10202-DPB110601 DPA10202-DPB11801 DPA10202-DPB11901 DPA10202-DPB13101 DPA10202-DPB13801 DPA10202-DPB15501 DPA10301-DPB10202 DPA10301-DPB110601 DPA10301-DPB14001 DPA10301-DPB16501 DPA10401-DPB10201 DPA10401-DPB10202
KEPPHLWFGFELFPDKWTVQ

SEQ ID NO: 7530 - protein, 20 aa, synthetic construct
  source 1..20: note = Seed: KEPPFLWMGYELHPDKWTVQ; note = HLAs: DRB1_0101 DRB1_1001 DPA10103-DPB10101 DPA10103-DPB10201 DPA10103-DPB10202 DPA10103-DPB10401 DPA10103-DPB10501 DPA10103-DPB112601 DPA10103-DPB11501 DPA10103-DPB11601 DPA10103-DPB11801 DPA10103-DPB11901 DPA10103-DPB12301 DPA10103-DPB13101 DPA10103-DPB13401 DPA10103-DPB13901 DPA10103-DPB14001 DPA10103-DPB14101 DPA10103-DPB14801 DPA10103-DPB15001 DPA10103-DPB15901 DPA10104-DPB10101 DPA10104-DPB11501 DPA10105-DPB10101 DPA10105-DPB10401 DPA10105-DPB11801 DPA10105-DPB15001 DPA10106-DPB10101 DPA10201-DPB10101 DPA10201-DPB10202 DPA10201-DPB10401 DPA10201-DPB110601 DPA10201-DPB11501 DPA10201-DPB11601 DPA10201-DPB11901 DPA10202-DPB10101 DPA10202-DPB10201 DPA10202-DPB10202 DPA10202-DPB10401 DPA10202-DPB10501 DPA10202-DPB110601 DPA10202-DPB11901 DPA10202-DPB13101 DPA10202-DPB13801 DPA10202-DPB16501 DPA10301-DPB10101 DPA10301-DPB10201 DPA10301-DPB10202 DPA10301-DPB10401 DPA10301-DPB10402 DPA10301-DPB110501 DPA10301-DPB110601 DPA10301-DPB11301 DPA10301-DPB11801 DPA10301-DPB12301; note = HLAs: DPA10301-DPB13901 DPA10301-DPB14001 DPA10301-DPB14901 DPA10301-DPB16501 DPA10301-DPB17501 DPA10301-DPB18001 DPA10401-DPB10101 DPA10401-DPB10201 DPA10401-DPB10202 DPA10401-DPB10402 DPA10401-DPB10501 DPA10401-DPB110501 DPA10401-DPB14901
KEPPWLWEGIELLPDKWTVQ

SEQ ID NO: 7531 - protein, 20 aa, synthetic construct
  source 1..20: note = Seed: KEPPFLWMGYELHPDKWTVQ; note = HLAs: DRB1_0101 DRB1_1001 DPA10103-DPB10101 DPA10103-DPB10201 DPA10103-DPB10202 DPA10103-DPB10401 DPA10103-DPB10402 DPA10103-DPB10501 DPA10103-DPB110501 DPA10103-DPB112601 DPA10103-DPB11501 DPA10103-DPB11601 DPA10103-DPB11801 DPA10103-DPB11901 DPA10103-DPB12301 DPA10103-DPB13101 DPA10103-DPB13401 DPA10103-DPB13901 DPA10103-DPB14001 DPA10103-DPB14101 DPA10103-DPB14801 DPA10103-DPB14901 DPA10103-DPB15001 DPA10103-DPB15101 DPA10103-DPB15901 DPA10103-DPB18001 DPA10104-DPB10101 DPA10104-DPB11501 DPA10105-DPB10101 DPA10105-DPB10401 DPA10105-DPB11801 DPA10105-DPB15001 DPA10106-DPB10101 DPA10201-DPB10101 DPA10201-DPB10201 DPA10201-DPB10202 DPA10201-DPB10501 DPA10201-DPB110601 DPA10201-DPB11501 DPA10201-DPB11601 DPA10201-DPB11901 DPA10201-DPB13401 DPA10202-DPB10101 DPA10202-DPB10201 DPA10202-DPB10202 DPA10202-DPB10401 DPA10202-DPB10501 DPA10202-DPB110601 DPA10202-DPB11301 DPA10202-DPB11801 DPA10202-DPB11901 DPA10202-DPB13101 DPA10202-DPB13801 DPA10202-DPB15501 DPA10202-DPB16501; note = HLAs: DPA10301-DPB10101 DPA10301-DPB10201 DPA10301-DPB10202 DPA10301-DPB10401 DPA10301-DPB10402 DPA10301-DPB110501 DPA10301-DPB110601 DPA10301-DPB11101 DPA10301-DPB11301 DPA10301-DPB11801 DPA10301-DPB12301 DPA10301-DPB13901 DPA10301-DPB14001 DPA10301-DPB14901 DPA10301-DPB15501 DPA10301-DPB16501 DPA10301-DPB17501 DPA10301-DPB18001 DPA10401-DPB10101 DPA10401-DPB10201 DPA10401-DPB10202 DPA10401-DPB10402 DPA10401-DPB10501 DPA10401-DPB110501 DPA10401-DPB14901
KEPPFLWQGLELTPDKWTVQ

SEQ ID NO: 7532 - protein, 20 aa, synthetic construct
  source 1..20: note = Seed: KEPPFLWMGYELHPDKWTVQ; note = HLAs: DRB1_0405 DRB1_1001 DPA10103-DPB10101 DPA10103-DPB10201 DPA10103-DPB10202 DPA10103-DPB10401 DPA10103-DPB10501 DPA10103-DPB112601 DPA10103-DPB11501 DPA10103-DPB11601 DPA10103-DPB11801 DPA10103-DPB11901 DPA10103-DPB12301 DPA10103-DPB13101 DPA10103-DPB13401 DPA10103-DPB13901 DPA10103-DPB14001 DPA10103-DPB14101 DPA10103-DPB14801 DPA10103-DPB15001 DPA10103-DPB15501 DPA10103-DPB15901 DPA10104-DPB10101 DPA10104-DPB11501 DPA10105-DPB10101 DPA10105-DPB10401 DPA10105-DPB11801 DPA10105-DPB15001 DPA10106-DPB10101 DPA10201-DPB10101 DPA10201-DPB10201 DPA10201-DPB10202 DPA10201-DPB10401 DPA10201-DPB110601 DPA10201-DPB11501 DPA10201-DPB11601 DPA10201-DPB11901 DPA10201-DPB13401 DPA10201-DPB15501 DPA10202-DPB10101 DPA10202-DPB10201 DPA10202-DPB10202 DPA10202-DPB10501 DPA10202-DPB110601 DPA10202-DPB11901 DPA10202-DPB13101 DPA10202-DPB13801 DPA10202-DPB15501 DPA10202-DPB16501 DPA10301-DPB10101 DPA10301-DPB10201 DPA10301-DPB10202 DPA10301-DPB10401 DPA10301-DPB10402 DPA10301-DPB110501; note = HLAs: DPA10301-DPB110601 DPA10301-DPB11101 DPA10301-DPB11301 DPA10301-DPB11801 DPA10301-DPB12301 DPA10301-DPB13901 DPA10301-DPB14001 DPA10301-DPB14901 DPA10301-DPB15501 DPA10301-DPB16501 DPA10301-DPB17501 DPA10301-DPB18001 DPA10401-DPB10101 DPA10401-DPB10201 DPA10401-DPB10202 DPA10401-DPB10402 DPA10401-DPB10501 DPA10401-DPB110501 DPA10401-DPB14901
KEPPFLWTGIELEPDKWTVQ

SEQ ID NO: 7533 - protein, 20 aa, synthetic construct
  source 1..20: note = Seed: KEPPFLWMGYELHPDKWTVQ; note = HLAs: DPA10103-DPB10101 DPA10103-DPB10201 DPA10103-DPB10202 DPA10103-DPB10401 DPA10103-DPB10501 DPA10103-DPB112601 DPA10103-DPB11501 DPA10103-DPB11601 DPA10103-DPB11801 DPA10103-DPB11901 DPA10103-DPB12301 DPA10103-DPB13101 DPA10103-DPB13401 DPA10103-DPB13901 DPA10103-DPB14001 DPA10103-DPB14101 DPA10103-DPB14801 DPA10103-DPB15001 DPA10103-DPB15501 DPA10103-DPB15901 DPA10104-DPB10101 DPA10104-DPB11501 DPA10105-DPB10101 DPA10105-DPB10401 DPA10105-DPB11801 DPA10105-DPB15001 DPA10106-DPB10101 DPA10201-DPB10101 DPA10201-DPB10201 DPA10201-DPB10202 DPA10201-DPB10401 DPA10201-DPB110601 DPA10201-DPB11501 DPA10201-DPB11601 DPA10201-DPB11901 DPA10202-DPB10101 DPA10202-DPB10201 DPA10202-DPB10202 DPA10202-DPB10401 DPA10202-DPB10501 DPA10202-DPB110601 DPA10202-DPB11301 DPA10202-DPB11901 DPA10202-DPB13101 DPA10202-DPB13801 DPA10202-DPB15501 DPA10202-DPB16501 DPA10301-DPB10101 DPA10301-DPB10201 DPA10301-DPB10202 DPA10301-DPB10401 DPA10301-DPB10402 DPA10301-DPB110501 DPA10301-DPB110601; note = HLAs: DPA10301-DPB11301 DPA10301-DPB11801 DPA10301-DPB12301 DPA10301-DPB13901 DPA10301-DPB14001 DPA10301-DPB14901 DPA10301-DPB16501 DPA10301-DPB17501 DPA10301-DPB18001 DPA10401-DPB10101 DPA10401-DPB10201 DPA10401-DPB10202 DPA10401-DPB10402 DPA10401-DPB10501 DPA10401-DPB110501 DPA10401-DPB14901
KEPPWLWEGLELLPDKWTVQ

SEQ ID NO: 7534 - protein, 14 aa, synthetic construct
  source 1..14: note = Seed: PPFLWMGYELHPDK; note = HLAs: DRB1_1001 DPA10103-DPB10101 DPA10103-DPB10201 DPA10103-DPB10202 DPA10103-DPB10401 DPA10103-DPB112601 DPA10103-DPB11501 DPA10103-DPB11601 DPA10103-DPB11901 DPA10103-DPB12301 DPA10103-DPB13101 DPA10103-DPB13401 DPA10103-DPB13901 DPA10103-DPB14001 DPA10103-DPB14101 DPA10103-DPB14801 DPA10103-DPB15001 DPA10103-DPB15901 DPA10104-DPB10101 DPA10104-DPB11501 DPA10105-DPB10101 DPA10105-DPB10401 DPA10105-DPB15001 DPA10106-DPB10101 DPA10201-DPB10101 DPA10201-DPB110601 DPA10201-DPB11501 DPA10201-DPB11601 DPA10201-DPB11901 DPA10202-DPB10101 DPA10202-DPB10201 DPA10202-DPB10202 DPA10202-DPB10401 DPA10202-DPB110601 DPA10202-DPB11901 DPA10202-DPB13101 DPA10202-DPB16501 DPA10301-DPB10101 DPA10301-DPB10201 DPA10301-DPB10202 DPA10301-DPB10401 DPA10301-DPB10402 DPA10301-DPB110501 DPA10301-DPB110601 DPA10301-DPB11801 DPA10301-DPB12301 DPA10301-DPB13901 DPA10301-DPB14001 DPA10301-DPB14901 DPA10301-DPB15501 DPA10301-DPB16501 DPA10301-DPB17501 DPA10301-DPB18001 DPA10401-DPB10101 DPA10401-DPB10201; note = HLAs: DPA10401-DPB10202
PPWLWLGFELEPDK

SEQ ID NO: 7535 - protein, 20 aa, synthetic construct
  source 1..20: note = Seed: KEPPFLWMGYELHPDKWTVQ; note = HLAs: DRB1_0101 DPA10103-DPB10101 DPA10103-DPB10201 DPA10103-DPB10202 DPA10103-DPB10401 DPA10103-DPB10501 DPA10103-DPB112601 DPA10103-DPB11501 DPA10103-DPB11601 DPA10103-DPB11801 DPA10103-DPB11901 DPA10103-DPB12301 DPA10103-DPB13101 DPA10103-DPB13401 DPA10103-DPB13901 DPA10103-DPB14001 DPA10103-DPB14101 DPA10103-DPB14801 DPA10103-DPB15001 DPA10103-DPB15501 DPA10103-DPB15901 DPA10104-DPB10101 DPA10104-DPB11501 DPA10105-DPB10101 DPA10105-DPB10401 DPA10105-DPB11801 DPA10105-DPB15001 DPA10106-DPB10101 DPA10201-DPB10101 DPA10201-DPB10201 DPA10201-DPB10202 DPA10201-DPB10401 DPA10201-DPB110601 DPA10201-DPB11501 DPA10201-DPB11601 DPA10201-DPB11901 DPA10201-DPB13401 DPA10201-DPB15501 DPA10202-DPB10101 DPA10202-DPB10201 DPA10202-DPB10202 DPA10202-DPB10401 DPA10202-DPB10501 DPA10202-DPB110601 DPA10202-DPB11101 DPA10202-DPB11301 DPA10202-DPB11801 DPA10202-DPB11901 DPA10202-DPB13101 DPA10202-DPB13801 DPA10202-DPB15501 DPA10202-DPB16501 DPA10301-DPB10101 DPA10301-DPB10201 DPA10301-DPB10202; note = HLAs: DPA10301-DPB10401 DPA10301-DPB10402 DPA10301-DPB110501 DPA10301-DPB110601 DPA10301-DPB11101 DPA10301-DPB11301 DPA10301-DPB11801 DPA10301-DPB12301 DPA10301-DPB13901 DPA10301-DPB14001 DPA10301-DPB14901 DPA10301-DPB15501 DPA10301-DPB16501 DPA10301-DPB17501 DPA10301-DPB18001 DPA10401-DPB10101 DPA10401-DPB10201 DPA10401-DPB10202 DPA10401-DPB10402 DPA10401-DPB10501 DPA10401-DPB110501 DPA10401-DPB14901
KEPPYLWWGYELIPDKWTVQ

SEQ ID NO: 7536 - protein, 20 aa, synthetic construct
  source 1..20: note = Seed: KEPPFLWMGYELHPDKWTVQ; note = HLAs: DPA10103-DPB10101 DPA10103-DPB10201 DPA10103-DPB10202 DPA10103-DPB10401 DPA10103-DPB10501 DPA10103-DPB112601 DPA10103-DPB11501 DPA10103-DPB11601 DPA10103-DPB11801 DPA10103-DPB11901 DPA10103-DPB12301 DPA10103-DPB13101 DPA10103-DPB13401 DPA10103-DPB13901 DPA10103-DPB14001 DPA10103-DPB14101 DPA10103-DPB14801 DPA10103-DPB15001 DPA10103-DPB15901 DPA10104-DPB10101 DPA10104-DPB11501 DPA10105-DPB10101 DPA10105-DPB10401 DPA10105-DPB11801 DPA10105-DPB15001 DPA10106-DPB10101 DPA10201-DPB10101 DPA10201-DPB10201 DPA10201-DPB10202 DPA10201-DPB10401 DPA10201-DPB10501 DPA10201-DPB110601 DPA10201-DPB11501 DPA10201-DPB11601 DPA10201-DPB11901 DPA10201-DPB13401 DPA10201-DPB15501 DPA10202-DPB10101 DPA10202-DPB10201 DPA10202-DPB10202 DPA10202-DPB10401 DPA10202-DPB10501 DPA10202-DPB110601 DPA10202-DPB11801 DPA10202-DPB11901 DPA10202-DPB13101 DPA10202-DPB13801 DPA10202-DPB15501 DPA10202-DPB16501 DPA10301-DPB10101 DPA10301-DPB10201 DPA10301-DPB10202 DPA10301-DPB10401 DPA10301-DPB10402 DPA10301-DPB110501; note = HLAs: DPA10301-DPB110601 DPA10301-DPB11801 DPA10301-DPB12301 DPA10301-DPB13901 DPA10301-DPB14001 DPA10301-DPB14901 DPA10301-DPB15501 DPA10301-DPB16501 DPA10301-DPB17501 DPA10301-DPB18001 DPA10401-DPB10101 DPA10401-DPB10201 DPA10401-DPB10202 DPA10401-DPB10402 DPA10401-DPB10501 DPA10401-DPB110501 DPA10401-DPB14901
KEPPLLWKGFELYPDKWTVQ

SEQ ID NO: 7537 - protein, 20 aa, synthetic construct
  source 1..20: note = Seed: KEPPFLWMGYELHPDKWTVQ; note = HLAs: DPA10103-DPB10101 DPA10103-DPB10201 DPA10103-DPB10202 DPA10103-DPB10401 DPA10103-DPB10402 DPA10103-DPB10501 DPA10103-DPB110501 DPA10103-DPB112601 DPA10103-DPB11501 DPA10103-DPB11601 DPA10103-DPB11801 DPA10103-DPB11901 DPA10103-DPB12301 DPA10103-DPB13101 DPA10103-DPB13401 DPA10103-DPB13901 DPA10103-DPB14001 DPA10103-DPB14101 DPA10103-DPB14801 DPA10103-DPB14901 DPA10103-DPB15001 DPA10103-DPB15101 DPA10103-DPB15501 DPA10103-DPB15901 DPA10103-DPB18001 DPA10104-DPB10101 DPA10104-DPB11501 DPA10105-DPB10101 DPA10105-DPB10401 DPA10105-DPB11801 DPA10105-DPB15001 DPA10106-DPB10101 DPA10201-DPB10101 DPA10201-DPB10201 DPA10201-DPB10202 DPA10201-DPB10401 DPA10201-DPB110601 DPA10201-DPB11501 DPA10201-DPB11601 DPA10201-DPB11901 DPA10201-DPB15501 DPA10202-DPB10101 DPA10202-DPB10201 DPA10202-DPB10202 DPA10202-DPB10401 DPA10202-DPB10501 DPA10202-DPB110601 DPA10202-DPB11301 DPA10202-DPB11901 DPA10202-DPB13101 DPA10202-DPB13801 DPA10202-DPB15501 DPA10202-DPB16501 DPA10301-DPB10101 DPA10301-DPB10201; note = HLAs: DPA10301-DPB10202 DPA10301-DPB10401 DPA10301-DPB10402 DPA10301-DPB110501 DPA10301-DPB110601 DPA10301-DPB11101 DPA10301-DPB11301 DPA10301-DPB11801 DPA10301-DPB12301 DPA10301-DPB13901 DPA10301-DPB14001 DPA10301-DPB14901 DPA10301-DPB15501 DPA10301-DPB16501 DPA10301-DPB17501 DPA10301-DPB18001 DPA10401-DPB10101 DPA10401-DPB10201 DPA10401-DPB10202 DPA10401-DPB10402 DPA10401-DPB10501 DPA10401-DPB110501 DPA10401-DPB14901
KEPPWLWNGFELSPDKWTVQ

SEQ ID NO: 7538 - protein, 20 aa, synthetic construct
  source 1..20: note = Seed: KEPPFLWMGYELHPDKWTVQ; note = HLAs: DPA10103-DPB10101 DPA10103-DPB10201 DPA10103-DPB10202 DPA10103-DPB10401 DPA10103-DPB10402 DPA10103-DPB10501 DPA10103-DPB110501 DPA10103-DPB112601 DPA10103-DPB11601 DPA10103-DPB11901 DPA10103-DPB12301 DPA10103-DPB13101 DPA10103-DPB13401 DPA10103-DPB13901 DPA10103-DPB14001 DPA10103-DPB14101 DPA10103-DPB14801 DPA10103-DPB14901 DPA10103-DPB15001 DPA10103-DPB15101 DPA10103-DPB15501 DPA10103-DPB15901 DPA10103-DPB18001 DPA10104-DPB10101 DPA10105-DPB10101 DPA10105-DPB10401 DPA10105-DPB15001 DPA10201-DPB10201 DPA10201-DPB10202 DPA10201-DPB10401 DPA10201-DPB10501 DPA10201-DPB110601 DPA10201-DPB11501 DPA10201-DPB11601 DPA10201-DPB11901 DPA10201-DPB13401 DPA10201-DPB15501 DPA10202-DPB10101 DPA10202-DPB10201 DPA10202-DPB10202 DPA10202-DPB10401 DPA10202-DPB10501 DPA10202-DPB110601 DPA10202-DPB11101 DPA10202-DPB11301 DPA10202-DPB11801 DPA10202-DPB11901 DPA10202-DPB13101 DPA10202-DPB13801 DPA10202-DPB15501 DPA10202-DPB16501 DPA10301-DPB10201 DPA10301-DPB10402 DPA10301-DPB110501; note = HLAs: DPA10301-DPB110601 DPA10301-DPB11101 DPA10301-DPB11301 DPA10301-DPB14901 DPA10301-DPB16501 DPA10301-DPB17501 DPA10301-DPB18001 DPA10401-DPB10101 DPA10401-DPB10201 DPA10401-DPB10202 DPA10401-DPB10402 DPA10401-DPB10501 DPA10401-DPB110501 DPA10401-DPB14901
KEPPRLWEGFELLPDKWTVQ

SEQ ID NO: 7539 - protein, 20 aa, synthetic construct
  source 1..20: note = Seed: KEPPFLWMGYELHPDKWTVQ; note = HLAs: DPA10103-DPB10101 DPA10103-DPB10201 DPA10103-DPB10202 DPA10103-DPB10401 DPA10103-DPB10402 DPA10103-DPB10501 DPA10103-DPB110501 DPA10103-DPB112601 DPA10103-DPB11501 DPA10103-DPB11601 DPA10103-DPB11801 DPA10103-DPB11901 DPA10103-DPB12301 DPA10103-DPB13101 DPA10103-DPB13401 DPA10103-DPB13901 DPA10103-DPB14001 DPA10103-DPB14101 DPA10103-DPB14801 DPA10103-DPB14901 DPA10103-DPB15001 DPA10103-DPB15101 DPA10103-DPB15501 DPA10103-DPB15901 DPA10103-DPB18001 DPA10104-DPB10101 DPA10104-DPB11501 DPA10105-DPB10101 DPA10105-DPB10401 DPA10105-DPB11801 DPA10105-DPB15001 DPA10106-DPB10101 DPA10201-DPB10101 DPA10201-DPB10201 DPA10201-DPB10202 DPA10201-DPB10401 DPA10201-DPB110601 DPA10201-DPB11501 DPA10201-DPB11601 DPA10201-DPB11901 DPA10201-DPB13401 DPA10201-DPB15501 DPA10202-DPB10101 DPA10202-DPB10201 DPA10202-DPB10202 DPA10202-DPB10401 DPA10202-DPB10501 DPA10202-DPB110601 DPA10202-DPB11301 DPA10202-DPB11801 DPA10202-DPB11901 DPA10202-DPB13101 DPA10202-DPB13801 DPA10202-DPB15501 DPA10202-DPB16501; note = HLAs: DPA10301-DPB10101 DPA10301-DPB10201 DPA10301-DPB10202 DPA10301-DPB10401 DPA10301-DPB10402 DPA10301-DPB110501 DPA10301-DPB110601 DPA10301-DPB11101 DPA10301-DPB11301 DPA10301-DPB11801 DPA10301-DPB12301 DPA10301-DPB13901 DPA10301-DPB14001 DPA10301-DPB14901 DPA10301-DPB15501 DPA10301-DPB16501 DPA10301-DPB17501 DPA10301-DPB18001 DPA10401-DPB10101 DPA10401-DPB10201 DPA10401-DPB10202 DPA10401-DPB10402 DPA10401-DPB10501 DPA10401-DPB110501 DPA10401-DPB14901
KEPPILWTGWELAPDKWTVQ

SEQ ID NO: 7540 - protein, 20 aa, synthetic construct
  source 1..20: note = Seed: KEPPFLWMGYELHPDKWTVQ; note = HLAs: DRB1_0101 DRB1_0405 DRB1_1001 DPA10103-DPB10202 DPA10103-DPB10401 DPA10103-DPB10501 DPA10103-DPB112601 DPA10103-DPB11501 DPA10103-DPB11601 DPA10103-DPB11801 DPA10103-DPB11901 DPA10103-DPB12301 DPA10103-DPB13401 DPA10103-DPB13901 DPA10103-DPB14101 DPA10103-DPB15001 DPA10103-DPB15901 DPA10104-DPB11501 DPA10105-DPB10401 DPA10105-DPB11801 DPA10105-DPB15001 DPA10106-DPB10101 DPA10201-DPB10101 DPA10201-DPB10501 DPA10201-DPB110601 DPA10201-DPB11501 DPA10201-DPB11901 DPA10201-DPB15501 DPA10202-DPB10101 DPA10202-DPB10202 DPA10202-DPB10501 DPA10202-DPB13101 DPA10202-DPB13801 DPA10202-DPB16501 DPA10301-DPB10101 DPA10301-DPB10201 DPA10301-DPB10202 DPA10301-DPB10401 DPA10301-DPB10402 DPA10301-DPB110501 DPA10301-DPB110601 DPA10301-DPB11101 DPA10301-DPB11801 DPA10301-DPB12301 DPA10301-DPB13901 DPA10301-DPB14001 DPA10301-DPB14901 DPA10301-DPB15501 DPA10301-DPB16501 DPA10301-DPB17501 DPA10301-DPB18001 DPA10401-DPB10202 DPA10401-DPB10402 DPA10401-DPB10501 DPA10401-DPB110501 DPA10401-DPB14901
KEPPFLWMGIELEPDKWTVQ

SEQ ID NO: 7541 - protein, 20 aa, synthetic construct
  source 1..20: note = Seed: KEPPFLWMGYELHPDKWTVQ; note = HLAs: DPA10103-DPB10101 DPA10103-DPB10201 DPA10103-DPB10202 DPA10103-DPB10401 DPA10103-DPB10402 DPA10103-DPB10501 DPA10103-DPB110501 DPA10103-DPB112601 DPA10103-DPB11501 DPA10103-DPB11601 DPA10103-DPB11801 DPA10103-DPB11901 DPA10103-DPB12301 DPA10103-DPB13101 DPA10103-DPB13401 DPA10103-DPB13901 DPA10103-DPB14001 DPA10103-DPB14101 DPA10103-DPB14801 DPA10103-DPB14901 DPA10103-DPB15001 DPA10103-DPB15101 DPA10103-DPB15501 DPA10103-DPB15901 DPA10103-DPB18001 DPA10104-DPB10101 DPA10104-DPB11501 DPA10105-DPB10101 DPA10105-DPB10401 DPA10105-DPB11801 DPA10105-DPB15001 DPA10106-DPB10101 DPA10201-DPB10101 DPA10201-DPB10201 DPA10201-DPB10202 DPA10201-DPB10401 DPA10201-DPB10501 DPA10201-DPB110601 DPA10201-DPB11501 DPA10201-DPB11601 DPA10201-DPB11901 DPA10201-DPB13401 DPA10202-DPB10101 DPA10202-DPB10201 DPA10202-DPB10202 DPA10202-DPB10401 DPA10202-DPB10501 DPA10202-DPB110601 DPA10202-DPB11901 DPA10202-DPB13101 DPA10202-DPB13801 DPA10202-DPB15501 DPA10202-DPB16501 DPA10301-DPB10101 DPA10301-DPB10201; note = HLAs: DPA10301-DPB10202 DPA10301-DPB10401 DPA10301-DPB10402 DPA10301-DPB110501 DPA10301-DPB110601 DPA10301-DPB11101 DPA10301-DPB11301 DPA10301-DPB11801 DPA10301-DPB12301 DPA10301-DPB13901 DPA10301-DPB14001 DPA10301-DPB14901 DPA10301-DPB15501 DPA10301-DPB16501 DPA10301-DPB17501 DPA10301-DPB18001 DPA10401-DPB10101 DPA10401-DPB10201 DPA10401-DPB10202 DPA10401-DPB10402 DPA10401-DPB10501 DPA10401-DPB110501 DPA10401-DPB14901
KEPPWLWDGFELFPDKWTVQ

SEQ ID NO: 7542 - protein, 20 aa, synthetic construct
  source 1..20: note = Seed: KEPPFLWMGYELHPDKWTVQ; note = HLAs: DPA10103-DPB10101 DPA10103-DPB10201 DPA10103-DPB10202 DPA10103-DPB10401 DPA10103-DPB10402 DPA10103-DPB10501 DPA10103-DPB110501 DPA10103-DPB112601 DPA10103-DPB11501 DPA10103-DPB11601 DPA10103-DPB11801 DPA10103-DPB11901 DPA10103-DPB12301 DPA10103-DPB13101 DPA10103-DPB13401 DPA10103-DPB13901 DPA10103-DPB14001 DPA10103-DPB14101 DPA10103-DPB14801 DPA10103-DPB14901 DPA10103-DPB15001 DPA10103-DPB15101 DPA10103-DPB15501 DPA10103-DPB15901 DPA10103-DPB18001 DPA10104-DPB10101 DPA10104-DPB11501 DPA10105-DPB10101 DPA10105-DPB10401 DPA10105-DPB11801 DPA10105-DPB15001 DPA10106-DPB10101 DPA10201-DPB10101 DPA10201-DPB10201 DPA10201-DPB10202 DPA10201-DPB10401 DPA10201-DPB10501 DPA10201-DPB110601 DPA10201-DPB11501 DPA10201-DPB11601 DPA10201-DPB11901 DPA10201-DPB13401 DPA10201-DPB15501 DPA10202-DPB10101 DPA10202-DPB10201 DPA10202-DPB10202 DPA10202-DPB10401 DPA10202-DPB10501 DPA10202-DPB110601 DPA10202-DPB11901 DPA10202-DPB13101 DPA10202-DPB13801 DPA10202-DPB15501 DPA10202-DPB16501 DPA10301-DPB10101; note = HLAs: DPA10301-DPB10201 DPA10301-DPB10202 DPA10301-DPB10401 DPA10301-DPB10402 DPA10301-DPB110501 DPA10301-DPB110601 DPA10301-DPB11801 DPA10301-DPB12301 DPA10301-DPB13901 DPA10301-DPB14001 DPA10301-DPB14901 DPA10301-DPB15501 DPA10301-DPB16501 DPA10301-DPB17501 DPA10301-DPB18001 DPA10401-DPB10101 DPA10401-DPB10201 DPA10401-DPB10202 DPA10401-DPB10402 DPA10401-DPB10501 DPA10401-DPB110501 DPA10401-DPB14901
KEPPFLWPGFELYPDKWTVQ

SEQ ID NO: 7543 - protein, 20 aa, synthetic construct
  source 1..20: note = Seed: KEPPFLWMGYELHPDKWTVQ; note = HLAs: DRB1_0405 DRB1_1001 DPA10103-DPB10101 DPA10103-DPB10201 DPA10103-DPB10202 DPA10103-DPB10401 DPA10103-DPB10501 DPA10103-DPB112601 DPA10103-DPB11501 DPA10103-DPB11601 DPA10103-DPB11901 DPA10103-DPB12301 DPA10103-DPB13101 DPA10103-DPB13401 DPA10103-DPB13901 DPA10103-DPB14001 DPA10103-DPB14101 DPA10103-DPB14801 DPA10103-DPB15001 DPA10103-DPB15501 DPA10103-DPB15901 DPA10104-DPB10101 DPA10104-DPB11501 DPA10105-DPB10101 DPA10105-DPB10401 DPA10105-DPB15001 DPA10106-DPB10101 DPA10201-DPB10101 DPA10201-DPB10202 DPA10201-DPB15501 DPA10202-DPB10101 DPA10301-DPB10101 DPA10301-DPB10201 DPA10301-DPB10202 DPA10301-DPB10401 DPA10301-DPB10402 DPA10301-DPB110501 DPA10301-DPB110601 DPA10301-DPB11101 DPA10301-DPB11301 DPA10301-DPB11801 DPA10301-DPB12301 DPA10301-DPB13901 DPA10301-DPB14001 DPA10301-DPB14901 DPA10301-DPB15501 DPA10301-DPB16501 DPA10301-DPB17501 DPA10301-DPB18001 DPA10401-DPB10101 DPA10401-DPB10201 DPA10401-DPB10202 DPA10401-DPB10402 DPA10401-DPB10501 DPA10401-DPB110501; note = HLAs: DPA10401-DPB14901
KEPPFLWAGIELEPDKWTVQ

SEQ ID NO: 7544 - protein, 20 aa, synthetic construct
  source 1..20: note = Seed: KEPPFLWMGYELHPDKWTVQ; note = HLAs: DPA10103-DPB10101 DPA10103-DPB10201 DPA10103-DPB10202 DPA10103-DPB10401 DPA10103-DPB10402 DPA10103-DPB10501 DPA10103-DPB110501 DPA10103-DPB112601 DPA10103-DPB11501 DPA10103-DPB11601 DPA10103-DPB11801 DPA10103-DPB11901 DPA10103-DPB12301 DPA10103-DPB13101 DPA10103-DPB13401 DPA10103-DPB13901 DPA10103-DPB14001 DPA10103-DPB14101 DPA10103-DPB14801 DPA10103-DPB14901 DPA10103-DPB15001 DPA10103-DPB15101 DPA10103-DPB15501 DPA10103-DPB15901 DPA10103-DPB18001 DPA10104-DPB10101 DPA10104-DPB11501 DPA10105-DPB10101 DPA10105-DPB10401 DPA10105-DPB11801 DPA10105-DPB15001 DPA10106-DPB10101 DPA10201-DPB10101 DPA10201-DPB10201 DPA10201-DPB10202 DPA10201-DPB10401 DPA10201-DPB110601 DPA10201-DPB11501 DPA10201-DPB11601 DPA10201-DPB11901 DPA10201-DPB13401 DPA10201-DPB15501 DPA10202-DPB10101 DPA10202-DPB10201 DPA10202-DPB10202 DPA10202-DPB10401 DPA10202-DPB10501 DPA10202-DPB110601 DPA10202-DPB11301 DPA10202-DPB11801 DPA10202-DPB11901 DPA10202-DPB13101 DPA10202-DPB13801 DPA10202-DPB15501 DPA10202-DPB16501; note = HLAs: DPA10301-DPB10101 DPA10301-DPB10201 DPA10301-DPB10202 DPA10301-DPB10401 DPA10301-DPB10402 DPA10301-DPB110501 DPA10301-DPB110601 DPA10301-DPB11301 DPA10301-DPB11801 DPA10301-DPB12301 DPA10301-DPB13901 DPA10301-DPB14001 DPA10301-DPB14901 DPA10301-DPB15501 DPA10301-DPB16501 DPA10301-DPB17501 DPA10301-DPB18001 DPA10401-DPB10101 DPA10401-DPB10201 DPA10401-DPB10202 DPA10401-DPB10402 DPA10401-DPB10501 DPA10401-DPB110501 DPA10401-DPB14901
KEPPYLWHGWELFPDKWTVQ

SEQ ID NO: 7545 - protein, 20 aa, synthetic construct
  source 1..20: note = Seed: KEPPFLWMGYELHPDKWTVQ; note = HLAs: DRB1_0101 DRB1_0405 DRB1_1001 DPA10103-DPB11501 DPA10104-DPB11501 DPA10106-DPB10101 DPA10201-DPB10101 DPA10201-DPB10201 DPA10201-DPB10401 DPA10201-DPB10501 DPA10201-DPB11501 DPA10201-DPB11601 DPA10201-DPB13401 DPA10202-DPB10101 DPA10202-DPB10201 DPA10202-DPB10202 DPA10202-DPB10401 DPA10202-DPB10501 DPA10202-DPB110601 DPA10202-DPB11101 DPA10202-DPB11801 DPA10202-DPB11901 DPA10202-DPB13101 DPA10202-DPB13801 DPA10202-DPB16501 DPA10301-DPB10202 DPA10301-DPB110601 DPA10301-DPB11301 DPA10301-DPB11801 DPA10301-DPB14001 DPA10301-DPB15501
KEPPFLWVGEELLPDKWTVQ

SEQ ID NO: 7546 - protein, 20 aa, synthetic construct
  source 1..20: note = Seed: KEPPFLWMGYELHPDKWTVQ; note = HLAs: DRB1_0101 DRB1_0405 DRB1_1001 DPA10103-DPB11501 DPA10103-DPB11801 DPA10103-DPB13401 DPA10103-DPB14001 DPA10104-DPB11501 DPA10105-DPB11801 DPA10201-DPB11501 DPA10202-DPB10101 DPA10202-DPB10202 DPA10202-DPB10401 DPA10202-DPB10501 DPA10202-DPB110601 DPA10202-DPB11101 DPA10202-DPB11801 DPA10202-DPB11901 DPA10202-DPB13801 DPA10202-DPB16501 DPA10301-DPB11801 DPA10301-DPB14001
KEPPILWLGTELLPDKWTVQ

SEQ ID NO: 7547 - protein, 20 aa, synthetic construct
  source 1..20: note = Seed: KEPPFLWMGYELHPDKWTVQ; note = HLAs: DPA10103-DPB10101 DPA10103-DPB10201 DPA10103-DPB10202 DPA10103-DPB10401 DPA10103-DPB10402 DPA10103-DPB10501 DPA10103-DPB110501 DPA10103-DPB112601 DPA10103-DPB11501 DPA10103-DPB11601 DPA10103-DPB11801 DPA10103-DPB11901 DPA10103-DPB12301 DPA10103-DPB13101 DPA10103-DPB13401 DPA10103-DPB13901 DPA10103-DPB14001 DPA10103-DPB14101 DPA10103-DPB14801 DPA10103-DPB14901 DPA10103-DPB15101 DPA10103-DPB15901 DPA10103-DPB18001 DPA10104-DPB10101 DPA10104-DPB11501 DPA10105-DPB10101 DPA10105-DPB10401 DPA10105-DPB11801 DPA10106-DPB10101 DPA10201-DPB10101 DPA10201-DPB10202 DPA10201-DPB10401 DPA10201-DPB10501 DPA10201-DPB110601 DPA10201-DPB11501 DPA10201-DPB11601 DPA10201-DPB11901 DPA10201-DPB13401 DPA10201-DPB15501 DPA10202-DPB10101 DPA10202-DPB10201 DPA10202-DPB10202 DPA10202-DPB10401 DPA10202-DPB10501 DPA10202-DPB110601 DPA10202-DPB11101 DPA10202-DPB11301 DPA10202-DPB11801 DPA10202-DPB11901 DPA10202-DPB13101 DPA10202-DPB13801 DPA10202-DPB15501 DPA10202-DPB16501 DPA10301-DPB10101 DPA10301-DPB10202; note = HLAs: DPA10301-DPB110601 DPA10301-DPB11101 DPA10301-DPB11301 DPA10301-DPB11801 DPA10301-DPB14001 DPA10301-DPB16501 DPA10301-DPB17501 DPA10401-DPB10101 DPA10401-DPB10201 DPA10401-DPB10202 DPA10401-DPB10402 DPA10401-DPB10501 DPA10401-DPB110501 DPA10401-DPB14901
KEPPCLWVGFELMPDKWTVQ

SEQ ID NO: 7548 - protein, 20 aa, synthetic construct
  source 1..20: note = Seed: KEPPFLWMGYELHPDKWTVQ; note = HLAs: DRB1_0101 DPA10103-DPB11801 DPA10103-DPB13401 DPA10103-DPB14001 DPA10105-DPB11801 DPA10201-DPB10201 DPA10201-DPB110601 DPA10201-DPB11501 DPA10201-DPB11601 DPA10201-DPB11901 DPA10201-DPB13401 DPA10202-DPB10501 DPA10202-DPB110601 DPA10202-DPB11801 DPA10202-DPB11901 DPA10202-DPB13801 DPA10301-DPB10201 DPA10301-DPB11301 DPA10301-DPB11801 DPA10301-DPB14001 DPA10401-DPB10202
KEPPMLWWGIELLPDKWTVQ

SEQ ID NO: 7549 - protein, 20 aa, synthetic construct
  source 1..20: note = Seed: KEPPFLWMGYELHPDKWTVQ; note = HLAs: DPA10103-DPB10101 DPA10103-DPB10201 DPA10103-DPB10202 DPA10103-DPB10501 DPA10103-DPB11501 DPA10103-DPB11601 DPA10103-DPB11901 DPA10103-DPB13101 DPA10103-DPB13401 DPA10103-DPB14001 DPA10103-DPB14801 DPA10104-DPB10101 DPA10104-DPB11501 DPA10105-DPB10101 DPA10106-DPB10101 DPA10201-DPB10101 DPA10201-DPB110601 DPA10201-DPB11901 DPA10202-DPB10101 DPA10202-DPB10501 DPA10202-DPB110601 DPA10202-DPB11801 DPA10202-DPB11901 DPA10202-DPB13101 DPA10202-DPB13801 DPA10202-DPB16501 DPA10301-DPB10101 DPA10301-DPB10202 DPA10301-DPB10401 DPA10301-DPB10402 DPA10301-DPB110501 DPA10301-DPB110601 DPA10301-DPB11801 DPA10301-DPB12301 DPA10301-DPB13901 DPA10301-DPB14001 DPA10301-DPB14901 DPA10301-DPB16501 DPA10301-DPB17501 DPA10301-DPB18001 DPA10401-DPB10101 DPA10401-DPB10201 DPA10401-DPB10501
KEPPMLWVGLELFPDKWTVQ

SEQ ID NO: 7550 - protein, 20 aa, synthetic construct
  source 1..20: note = Seed: KEPPFLWMGYELHPDKWTVQ; note = HLAs: DPA10103-DPB10101 DPA10103-DPB10201 DPA10103-DPB10202 DPA10103-DPB10401 DPA10103-DPB10501 DPA10103-DPB112601 DPA10103-DPB11601 DPA10103-DPB11901 DPA10103-DPB12301 DPA10103-DPB13101 DPA10103-DPB13401 DPA10103-DPB13901 DPA10103-DPB14001 DPA10103-DPB14101 DPA10103-DPB14801 DPA10103-DPB15001 DPA10103-DPB15501 DPA10103-DPB15901 DPA10104-DPB10101 DPA10105-DPB10101 DPA10105-DPB10401 DPA10105-DPB15001 DPA10201-DPB10201 DPA10201-DPB10202 DPA10201-DPB10401 DPA10201-DPB10501 DPA10201-DPB110601 DPA10201-DPB11601 DPA10201-DPB11901 DPA10201-DPB13401 DPA10201-DPB15501 DPA10202-DPB10101 DPA10202-DPB10202 DPA10202-DPB10401 DPA10202-DPB10501 DPA10202-DPB110601 DPA10202-DPB11101 DPA10202-DPB11301 DPA10202-DPB11801 DPA10202-DPB11901 DPA10202-DPB13101 DPA10202-DPB13801 DPA10202-DPB15501 DPA10202-DPB16501 DPA10301-DPB10101 DPA10301-DPB10202 DPA10301-DPB110601 DPA10301-DPB11101 DPA10301-DPB11301 DPA10301-DPB16501 DPA10401-DPB10101 DPA10401-DPB10201 DPA10401-DPB10202 DPA10401-DPB10402 DPA10401-DPB10501; note = HLAs: DPA10401-DPB110501 DPA10401-DPB14901
KEPPKLWVGFELIPDKWTVQ

SEQ ID NO: 7551 - protein, 20 aa, synthetic construct
  source 1..20: note = Seed: KEPPFLWMGYELHPDKWTVQ; note = HLAs: DRB1_0101 DRB1_1001 DPA10103-DPB10101 DPA10103-DPB10201 DPA10103-DPB10202 DPA10103-DPB10401 DPA10103-DPB10501 DPA10103-DPB112601 DPA10103-DPB11501 DPA10103-DPB11601 DPA10103-DPB11801 DPA10103-DPB11901 DPA10103-DPB12301 DPA10103-DPB13101 DPA10103-DPB13401 DPA10103-DPB13901 DPA10103-DPB14001 DPA10103-DPB14801 DPA10103-DPB15001 DPA10103-DPB15501 DPA10103-DPB15901 DPA10104-DPB10101 DPA10104-DPB11501 DPA10105-DPB10101 DPA10105-DPB10401 DPA10105-DPB11801 DPA10105-DPB15001 DPA10106-DPB10101 DPA10201-DPB10101 DPA10201-DPB10202 DPA10201-DPB110601 DPA10201-DPB11501 DPA10201-DPB11601 DPA10201-DPB11901 DPA10202-DPB10101 DPA10202-DPB10201 DPA10202-DPB10202 DPA10202-DPB10401 DPA10202-DPB10501 DPA10202-DPB110601 DPA10202-DPB11101 DPA10202-DPB11301 DPA10202-DPB11801 DPA10202-DPB11901 DPA10202-DPB13101 DPA10202-DPB13801 DPA10202-DPB15501 DPA10202-DPB16501 DPA10301-DPB10101 DPA10301-DPB10201 DPA10301-DPB10202 DPA10301-DPB10401 DPA10301-DPB10402 DPA10301-DPB110501 DPA10301-DPB110601; note = HLAs: DPA10301-DPB11101 DPA10301-DPB11301 DPA10301-DPB11801 DPA10301-DPB12301 DPA10301-DPB13901 DPA10301-DPB14001 DPA10301-DPB14901 DPA10301-DPB15501 DPA10301-DPB16501 DPA10301-DPB17501 DPA10301-DPB18001 DPA10401-DPB10101 DPA10401-DPB10201 DPA10401-DPB10202 DPA10401-DPB10402 DPA10401-DPB10501 DPA10401-DPB110501 DPA10401-DPB14901
KEPPLLWEGIELVPDKWTVQ

SEQ ID NO: 7552 - protein, 20 aa, synthetic construct
  source 1..20: note = Seed: KEPPFLWMGYELHPDKWTVQ; note = HLAs: DRB1_0101 DRB1_0405 DRB1_1001 DPA10103-DPB11501 DPA10103-DPB11801 DPA10103-DPB13401 DPA10104-DPB11501 DPA10105-DPB11801 DPA10201-DPB10202 DPA10201-DPB11501 DPA10201-DPB11601 DPA10202-DPB10101 DPA10202-DPB10401 DPA10202-DPB10501 DPA10202-DPB110601 DPA10202-DPB11101 DPA10202-DPB11801 DPA10202-DPB11901 DPA10202-DPB13801 DPA10202-DPB16501 DPA10301-DPB10202 DPA10301-DPB11801 DPA10301-DPB14001
KEPPILWIGTELLPDKWTVQ

SEQ ID NO: 7553 - protein, 14 aa, synthetic construct
  source 1..14: note = Seed: PPFLWMGYELHPDK; note = HLAs: DRB1_1001 DPA10103-DPB10101 DPA10103-DPB10201 DPA10103-DPB10202 DPA10103-DPB10401 DPA10103-DPB112601 DPA10103-DPB11501 DPA10103-DPB11601 DPA10103-DPB11901 DPA10103-DPB12301 DPA10103-DPB13101 DPA10103-DPB13401 DPA10103-DPB13901 DPA10103-DPB14001 DPA10103-DPB14101 DPA10103-DPB14801 DPA10103-DPB15001 DPA10104-DPB10101 DPA10104-DPB11501 DPA10105-DPB10101 DPA10105-DPB10401 DPA10105-DPB15001 DPA10106-DPB10101 DPA10201-DPB10101 DPA10201-DPB110601 DPA10201-DPB11501 DPA10201-DPB11901 DPA10202-DPB10101 DPA10202-DPB10201 DPA10202-DPB10202 DPA10202-DPB10401 DPA10202-DPB110601 DPA10202-DPB11901 DPA10202-DPB13101 DPA10202-DPB16501 DPA10301-DPB10101 DPA10301-DPB10201 DPA10301-DPB10202 DPA10301-DPB10401 DPA10301-DPB10402 DPA10301-DPB110501 DPA10301-DPB110601 DPA10301-DPB11801 DPA10301-DPB12301 DPA10301-DPB13901 DPA10301-DPB14001 DPA10301-DPB14901 DPA10301-DPB15501 DPA10301-DPB16501 DPA10301-DPB17501 DPA10301-DPB18001 DPA10401-DPB10201 DPA10401-DPB10202 DPA10401-DPB10402 DPA10401-DPB10501; note = HLAs: DPA10401-DPB110501 DPA10401-DPB14901
PPFLWLGAELMPDK

SEQ ID NO: 7554 - protein, 20 aa, synthetic construct
  source 1..20: note = Seed: KEPPFLWMGYELHPDKWTVQ; note = HLAs: DRB1_0101 DRB1_0405 DRB1_1001 DPA10103-DPB10101 DPA10103-DPB10201 DPA10103-DPB10202 DPA10103-DPB10401 DPA10103-DPB10501 DPA10103-DPB112601 DPA10103-DPB11501 DPA10103-DPB11801 DPA10103-DPB12301 DPA10103-DPB13401 DPA10103-DPB13901 DPA10103-DPB14001 DPA10103-DPB14801 DPA10103-DPB15501 DPA10104-DPB10101 DPA10104-DPB11501 DPA10105-DPB10101 DPA10105-DPB10401 DPA10105-DPB11801 DPA10106-DPB10101 DPA10201-DPB10101 DPA10201-DPB10201 DPA10201-DPB10202 DPA10201-DPB10401 DPA10201-DPB10501 DPA10201-DPB110601 DPA10201-DPB11501 DPA10201-DPB11601 DPA10201-DPB11901 DPA10201-DPB13401 DPA10202-DPB10101 DPA10202-DPB10201 DPA10202-DPB10202 DPA10202-DPB10401 DPA10202-DPB10501 DPA10202-DPB110601 DPA10202-DPB11101 DPA10202-DPB11801 DPA10202-DPB11901 DPA10202-DPB13101 DPA10202-DPB13801 DPA10202-DPB15501 DPA10202-DPB16501 DPA10301-DPB10101 DPA10301-DPB10201 DPA10301-DPB10202 DPA10301-DPB10401 DPA10301-DPB10402 DPA10301-DPB110501 DPA10301-DPB110601 DPA10301-DPB11101 DPA10301-DPB11801 DPA10301-DPB12301; note = HLAs: DPA10301-DPB13901 DPA10301-DPB14001 DPA10301-DPB14901 DPA10301-DPB16501 DPA10301-DPB17501 DPA10301-DPB18001 DPA10401-DPB10201 DPA10401-DPB10402 DPA10401-DPB10501 DPA10401-DPB110501 DPA10401-DPB14901
KEPPFLWLGSELFPDKWTVQ

SEQ ID NO: 7555 - protein, 20 aa, synthetic construct
  source 1..20: note = Seed: KEPPFLWMGYELHPDKWTVQ; note = HLAs: DRB1_0101 DRB1_0405 DRB1_1001 DPA10103-DPB10101 DPA10103-DPB10202 DPA10103-DPB10501 DPA10103-DPB11601 DPA10103-DPB11901 DPA10103-DPB13101 DPA10103-DPB13401 DPA10103-DPB15001 DPA10103-DPB15501 DPA10104-DPB10101 DPA10105-DPB10101 DPA10105-DPB15001 DPA10106-DPB10101 DPA10201-DPB10101 DPA10201-DPB10501 DPA10201-DPB110601 DPA10201-DPB11501 DPA10201-DPB11901 DPA10202-DPB10101 DPA10202-DPB10501 DPA10202-DPB110601 DPA10202-DPB11101 DPA10202-DPB11901 DPA10202-DPB13101 DPA10202-DPB13801 DPA10202-DPB16501 DPA10301-DPB10101 DPA10301-DPB10402 DPA10301-DPB110501 DPA10301-DPB11101 DPA10301-DPB11301 DPA10301-DPB11801 DPA10301-DPB14901 DPA10301-DPB15501 DPA10301-DPB16501 DPA10301-DPB17501 DPA10301-DPB18001 DPA10401-DPB10101 DPA10401-DPB10402 DPA10401-DPB10501 DPA10401-DPB110501 DPA10401-DPB14901
KEPPFLWVGVELHPDKWTVQ

SEQ ID NO: 7556 - protein, 20 aa, synthetic construct
  source 1..20: note = Seed: KEPPFLWMGYELHPDKWTVQ; note = HLAs: DRB1_0101 DRB1_0405 DRB1_1001 DPA10103-DPB10101 DPA10103-DPB10201 DPA10103-DPB10202 DPA10103-DPB10401 DPA10103-DPB10501 DPA10103-DPB112601 DPA10103-DPB11501 DPA10103-DPB11601 DPA10103-DPB11801 DPA10103-DPB11901 DPA10103-DPB12301 DPA10103-DPB13101 DPA10103-DPB13401 DPA10103-DPB13901 DPA10103-DPB14001 DPA10103-DPB14101 DPA10103-DPB14801 DPA10103-DPB15001 DPA10103-DPB15501 DPA10103-DPB15901 DPA10104-DPB10101 DPA10104-DPB11501 DPA10105-DPB10101 DPA10105-DPB10401 DPA10105-DPB11801 DPA10105-DPB15001 DPA10106-DPB10101 DPA10201-DPB10101 DPA10201-DPB10202 DPA10201-DPB10501 DPA10201-DPB110601 DPA10201-DPB11501 DPA10201-DPB11601 DPA10201-DPB11901 DPA10201-DPB15501 DPA10202-DPB10101 DPA10202-DPB10201 DPA10202-DPB10202 DPA10202-DPB10401 DPA10202-DPB10501 DPA10202-DPB110601 DPA10202-DPB11101 DPA10202-DPB11301 DPA10202-DPB11801 DPA10202-DPB11901 DPA10202-DPB13101 DPA10202-DPB13801 DPA10202-DPB15501 DPA10202-DPB16501 DPA10301-DPB10101 DPA10301-DPB10201 DPA10301-DPB10202 DPA10301-DPB10401; note = HLAs: DPA10301-DPB10402 DPA10301-DPB110501 DPA10301-DPB110601 DPA10301-DPB11101 DPA10301-DPB11301 DPA10301-DPB11801 DPA10301-DPB12301 DPA10301-DPB13901 DPA10301-DPB14001 DPA10301-DPB14901 DPA10301-DPB15501 DPA10301-DPB16501 DPA10301-DPB17501 DPA10301-DPB18001 DPA10401-DPB10101 DPA10401-DPB10201 DPA10401-DPB10202 DPA10401-DPB10402 DPA10401-DPB10501 DPA10401-DPB110501 DPA10401-DPB14901
KEPPFLWIGAELAPDKWTVQ

SEQ ID NO: 7557 - protein, 20 aa, synthetic construct
  source 1..20: note = Seed: KEPPFLWMGYELHPDKWTVQ; note = HLAs: DRB1_0101 DRB1_0405 DRB1_1001 DPA10103-DPB10101 DPA10103-DPB10202 DPA10103-DPB10401 DPA10103-DPB10501 DPA10103-DPB112601 DPA10103-DPB11501 DPA10103-DPB11601 DPA10103-DPB11901 DPA10103-DPB12301 DPA10103-DPB13101 DPA10103-DPB13901 DPA10103-DPB14001 DPA10103-DPB14101 DPA10103-DPB15001 DPA10103-DPB15501 DPA10104-DPB10101 DPA10104-DPB11501 DPA10105-DPB10101 DPA10105-DPB10401 DPA10105-DPB15001 DPA10106-DPB10101 DPA10201-DPB10101 DPA10201-DPB10501 DPA10201-DPB110601 DPA10201-DPB11501 DPA10201-DPB11901 DPA10201-DPB15501 DPA10202-DPB10101 DPA10202-DPB10202 DPA10202-DPB10501 DPA10202-DPB110601 DPA10202-DPB11101 DPA10202-DPB11301 DPA10202-DPB11901 DPA10202-DPB13101 DPA10202-DPB13801 DPA10202-DPB15501 DPA10202-DPB16501 DPA10301-DPB10101 DPA10301-DPB10201 DPA10301-DPB10202 DPA10301-DPB10401 DPA10301-DPB10402 DPA10301-DPB110501 DPA10301-DPB110601 DPA10301-DPB11101 DPA10301-DPB11301 DPA10301-DPB11801 DPA10301-DPB12301 DPA10301-DPB13901 DPA10301-DPB14001 DPA10301-DPB14901 DPA10301-DPB15501; note = HLAs: DPA10301-DPB16501 DPA10301-DPB17501 DPA10301-DPB18001 DPA10401-DPB10101 DPA10401-DPB10201 DPA10401-DPB10202 DPA10401-DPB10402 DPA10401-DPB10501 DPA10401-DPB110501 DPA10401-DPB14901
KEPPFLWIGVELEPDKWTVQ

SEQ ID NO: 7558 - protein, 14 aa, synthetic construct
  source 1..14: note = Seed: PPFLWMGYELHPDK; note = HLAs: DPA10103-DPB10101 DPA10103-DPB10201 DPA10103-DPB10202 DPA10103-DPB10401 DPA10103-DPB112601 DPA10103-DPB11501 DPA10103-DPB11601 DPA10103-DPB11901 DPA10103-DPB12301 DPA10103-DPB13101 DPA10103-DPB13401 DPA10103-DPB13901 DPA10103-DPB14001 DPA10103-DPB14101 DPA10103-DPB14801 DPA10104-DPB10101 DPA10104-DPB11501 DPA10105-DPB10101 DPA10105-DPB10401 DPA10106-DPB10101 DPA10201-DPB10101 DPA10201-DPB110601 DPA10201-DPB11501 DPA10201-DPB11601 DPA10201-DPB11901 DPA10202-DPB10101 DPA10202-DPB10201 DPA10202-DPB10202 DPA10202-DPB10401 DPA10202-DPB110601 DPA10202-DPB11901 DPA10202-DPB13101 DPA10202-DPB16501 DPA10301-DPB10101 DPA10301-DPB10201 DPA10301-DPB10202 DPA10301-DPB10401 DPA10301-DPB10402 DPA10301-DPB110501 DPA10301-DPB110601 DPA10301-DPB11801 DPA10301-DPB12301 DPA10301-DPB13901 DPA10301-DPB14001 DPA10301-DPB14901 DPA10301-DPB15501 DPA10301-DPB16501 DPA10301-DPB17501 DPA10301-DPB18001 DPA10401-DPB10101 DPA10401-DPB10201 DPA10401-DPB10202 DPA10401-DPB10402 DPA10401-DPB110501; note = HLAs: DPA10401-DPB14901
PPLLWNGYELIPDK

SEQ ID NO: 7559 - protein, 20 aa, synthetic construct
  source 1..20: note = Seed: KEPPFLWMGYELHPDKWTVQ; note = HLAs: DRB1_0101 DRB1_0405 DRB1_1001 DPA10103-DPB10201 DPA10103-DPB10202 DPA10103-DPB10401 DPA10103-DPB10501 DPA10103-DPB112601 DPA10103-DPB11501 DPA10103-DPB11601 DPA10103-DPB11801 DPA10103-DPB11901 DPA10103-DPB12301 DPA10103-DPB13401 DPA10103-DPB13901 DPA10103-DPB14001 DPA10103-DPB14101 DPA10103-DPB14801 DPA10103-DPB15001 DPA10103-DPB15501 DPA10103-DPB15901 DPA10104-DPB11501 DPA10105-DPB10401 DPA10105-DPB11801 DPA10105-DPB15001 DPA10106-DPB10101 DPA10201-DPB10101 DPA10201-DPB10201 DPA10201-DPB10202 DPA10201-DPB10501 DPA10201-DPB110601 DPA10201-DPB11501 DPA10201-DPB11601 DPA10201-DPB11901 DPA10201-DPB15501 DPA10202-DPB10101 DPA10202-DPB10201 DPA10202-DPB10202 DPA10202-DPB10401 DPA10202-DPB10501 DPA10202-DPB110601 DPA10202-DPB11101 DPA10202-DPB11301 DPA10202-DPB11801 DPA10202-DPB11901 DPA10202-DPB13101 DPA10202-DPB13801 DPA10202-DPB15501 DPA10202-DPB16501 DPA10301-DPB10101 DPA10301-DPB10201 DPA10301-DPB10202 DPA10301-DPB10401 DPA10301-DPB10402 DPA10301-DPB110501 DPA10301-DPB110601; note = HLAs: DPA10301-DPB11101 DPA10301-DPB11301 DPA10301-DPB11801 DPA10301-DPB12301 DPA10301-DPB13901 DPA10301-DPB14001 DPA10301-DPB14901 DPA10301-DPB15501 DPA10301-DPB16501 DPA10301-DPB17501 DPA10301-DPB18001 DPA10401-DPB10201 DPA10401-DPB10202 DPA10401-DPB10402 DPA10401-DPB10501 DPA10401-DPB110501 DPA10401-DPB14901
KEPPFLWFGAELAPDKWTVQ

SEQ ID NO: 7560 - protein, 20 aa, synthetic construct
  source 1..20: note = Seed: KEPPFLWMGYELHPDKWTVQ; note = HLAs: DRB1_0101 DRB1_0405 DRB1_1001 DPA10103-DPB10101 DPA10103-DPB10201 DPA10103-DPB10202 DPA10103-DPB10401 DPA10103-DPB112601 DPA10103-DPB11501 DPA10103-DPB11601 DPA10103-DPB11901 DPA10103-DPB12301 DPA10103-DPB13101 DPA10103-DPB13401 DPA10103-DPB13901 DPA10103-DPB14001 DPA10103-DPB14101 DPA10103-DPB14801 DPA10103-DPB15001 DPA10103-DPB15501 DPA10103-DPB15901 DPA10104-DPB10101 DPA10104-DPB11501 DPA10105-DPB10101 DPA10105-DPB10401 DPA10105-DPB15001 DPA10106-DPB10101 DPA10201-DPB10101 DPA10201-DPB10201 DPA10201-DPB10202 DPA10201-DPB10401 DPA10201-DPB110601 DPA10201-DPB11501 DPA10201-DPB11601 DPA10201-DPB11901 DPA10201-DPB15501 DPA10202-DPB10101 DPA10202-DPB10201 DPA10202-DPB10202 DPA10202-DPB10401 DPA10202-DPB10501 DPA10202-DPB110601 DPA10202-DPB11101 DPA10202-DPB11301 DPA10202-DPB11901 DPA10202-DPB13101 DPA10202-DPB13801 DPA10202-DPB15501 DPA10202-DPB16501 DPA10301-DPB10101 DPA10301-DPB10201 DPA10301-DPB10202 DPA10301-DPB10401 DPA10301-DPB10402 DPA10301-DPB110501 DPA10301-DPB110601; note = HLAs: DPA10301-DPB11101 DPA10301-DPB11301 DPA10301-DPB11801 DPA10301-DPB12301 DPA10301-DPB13901 DPA10301-DPB14001 DPA10301-DPB14901 DPA10301-DPB15501 DPA10301-DPB16501 DPA10301-DPB17501 DPA10301-DPB18001 DPA10401-DPB10101 DPA10401-DPB10201 DPA10401-DPB10202 DPA10401-DPB10402 DPA10401-DPB10501 DPA10401-DPB110501 DPA10401-DPB14901
KEPPFLWNGAELIPDKWTVQ

SEQ ID NO: 7561 - protein, 20 aa, synthetic construct
  source 1..20: note = Seed: KEPPFLWMGYELHPDKWTVQ; note = HLAs: DRB1_0101 DRB1_0405 DRB1_1001 DPA10103-DPB10201 DPA10103-DPB10202 DPA10103-DPB10401 DPA10103-DPB10501 DPA10103-DPB112601 DPA10103-DPB11501 DPA10103-DPB11801 DPA10103-DPB12301 DPA10103-DPB13401 DPA10103-DPB13901 DPA10103-DPB14001 DPA10103-DPB14101 DPA10103-DPB14801 DPA10103-DPB15501 DPA10104-DPB11501 DPA10105-DPB10401 DPA10105-DPB11801 DPA10106-DPB10101 DPA10201-DPB10101 DPA10201-DPB10201 DPA10201-DPB10202 DPA10201-DPB10501 DPA10201-DPB110601 DPA10201-DPB11501 DPA10201-DPB11601 DPA10201-DPB11901 DPA10202-DPB10101 DPA10202-DPB10201 DPA10202-DPB10202 DPA10202-DPB10401 DPA10202-DPB10501 DPA10202-DPB110601 DPA10202-DPB11101 DPA10202-DPB11301 DPA10202-DPB11801 DPA10202-DPB11901 DPA10202-DPB13101 DPA10202-DPB13801 DPA10202-DPB15501 DPA10202-DPB16501 DPA10301-DPB10201 DPA10301-DPB10202 DPA10301-DPB10401 DPA10301-DPB10402 DPA10301-DPB110501 DPA10301-DPB110601 DPA10301-DPB11101 DPA10301-DPB11301 DPA10301-DPB11801 DPA10301-DPB12301 DPA10301-DPB13901 DPA10301-DPB14001 DPA10301-DPB14901; note = HLAs: DPA10301-DPB15501 DPA10301-DPB16501 DPA10301-DPB17501 DPA10301-DPB18001 DPA10401-DPB10201 DPA10401-DPB10202 DPA10401-DPB10402 DPA10401-DPB110501 DPA10401-DPB14901
KEPPLLWLGAELLPDKWTVQ

SEQ ID NO: 7562 - protein, 20 aa, synthetic construct
  source 1..20: note = Seed: KEPPFLWMGYELHPDKWTVQ; note = HLAs: DRB1_0101 DRB1_0405 DRB1_1001 DPA10103-DPB10101 DPA10103-DPB10201 DPA10103-DPB10202 DPA10103-DPB10401 DPA10103-DPB10501 DPA10103-DPB112601 DPA10103-DPB11501 DPA10103-DPB11601 DPA10103-DPB11801 DPA10103-DPB11901 DPA10103-DPB12301 DPA10103-DPB13101 DPA10103-DPB13401 DPA10103-DPB13901 DPA10103-DPB14001 DPA10103-DPB14101 DPA10103-DPB14801 DPA10103-DPB15001 DPA10103-DPB15501 DPA10103-DPB15901 DPA10104-DPB10101 DPA10104-DPB11501 DPA10105-DPB10101 DPA10105-DPB10401 DPA10105-DPB11801 DPA10105-DPB15001 DPA10106-DPB10101 DPA10201-DPB10101 DPA10201-DPB10501 DPA10201-DPB110601 DPA10201-DPB11501 DPA10201-DPB11601 DPA10201-DPB11901 DPA10201-DPB15501 DPA10202-DPB10101 DPA10202-DPB10202 DPA10202-DPB10501 DPA10202-DPB110601 DPA10202-DPB11101 DPA10202-DPB11301 DPA10202-DPB11901 DPA10202-DPB13101 DPA10202-DPB13801 DPA10202-DPB15501 DPA10202-DPB16501 DPA10301-DPB10101 DPA10301-DPB10201 DPA10301-DPB10202 DPA10301-DPB10401 DPA10301-DPB10402 DPA10301-DPB110501 DPA10301-DPB110601 DPA10301-DPB11101; note = HLAs: DPA10301-DPB11301 DPA10301-DPB11801 DPA10301-DPB12301 DPA10301-DPB13901 DPA10301-DPB14001 DPA10301-DPB14901 DPA10301-DPB15501 DPA10301-DPB16501 DPA10301-DPB17501 DPA10301-DPB18001 DPA10401-DPB10101 DPA10401-DPB10201 DPA10401-DPB10202 DPA10401-DPB10402 DPA10401-DPB10501 DPA10401-DPB110501 DPA10401-DPB14901
KEPPFLWMGLELEPDKWTVQ

SEQ ID NO: 7563 - protein, 20 aa, synthetic construct
  source 1..20: note = Seed: KEPPFLWMGYELHPDKWTVQ; note = HLAs: DRB1_0101 DRB1_1001 DPA10103-DPB10202 DPA10103-DPB10501 DPA10103-DPB11501 DPA10103-DPB11801 DPA10103-DPB13401 DPA10103-DPB14001 DPA10104-DPB11501 DPA10105-DPB11801 DPA10106-DPB10101 DPA10201-DPB10101 DPA10201-DPB10401 DPA10201-DPB110601 DPA10201-DPB11501 DPA10201-DPB11601 DPA10201-DPB11901 DPA10202-DPB10101 DPA10202-DPB10501 DPA10202-DPB110601 DPA10202-DPB11801 DPA10202-DPB11901 DPA10202-DPB13101 DPA10202-DPB13801 DPA10202-DPB16501 DPA10301-DPB10101 DPA10301-DPB10202 DPA10301-DPB10401 DPA10301-DPB10402 DPA10301-DPB110501 DPA10301-DPB110601 DPA10301-DPB11801 DPA10301-DPB12301 DPA10301-DPB13901 DPA10301-DPB14001 DPA10301-DPB14901 DPA10301-DPB16501 DPA10301-DPB17501 DPA10301-DPB18001 DPA10401-DPB10201 DPA10401-DPB10402 DPA10401-DPB110501 DPA10401-DPB14901
KEPPILWLGIELFPDKWTVQ

SEQ ID NO: 7564 - protein, 20 aa, synthetic construct
  source 1..20: note = Seed: KEPPFLWMGYELHPDKWTVQ; note = HLAs: DRB1_0101 DRB1_0405 DRB1_1001 DPA10103-DPB10101 DPA10103-DPB10201 DPA10103-DPB10202 DPA10103-DPB10401 DPA10103-DPB10501 DPA10103-DPB112601 DPA10103-DPB11501 DPA10103-DPB11601 DPA10103-DPB11801 DPA10103-DPB11901 DPA10103-DPB12301 DPA10103-DPB13101 DPA10103-DPB13401 DPA10103-DPB13901 DPA10103-DPB14001 DPA10103-DPB14101 DPA10103-DPB14801 DPA10103-DPB15001 DPA10103-DPB15501 DPA10103-DPB15901 DPA10104-DPB10101 DPA10104-DPB11501 DPA10105-DPB10101 DPA10105-DPB10401 DPA10105-DPB11801 DPA10105-DPB15001 DPA10106-DPB10101 DPA10201-DPB10101 DPA10201-DPB10201 DPA10201-DPB10202 DPA10201-DPB10501 DPA10201-DPB110601 DPA10201-DPB11501 DPA10201-DPB11601 DPA10201-DPB11901 DPA10201-DPB15501 DPA10202-DPB10101 DPA10202-DPB10201 DPA10202-DPB10202 DPA10202-DPB10401 DPA10202-DPB10501 DPA10202-DPB110601 DPA10202-DPB11101 DPA10202-DPB11301 DPA10202-DPB11801 DPA10202-DPB11901 DPA10202-DPB13101 DPA10202-DPB13801 DPA10202-DPB15501 DPA10202-DPB16501 DPA10301-DPB10101 DPA10301-DPB10201 DPA10301-DPB10202; note = HLAs: DPA10301-DPB10401 DPA10301-DPB10402 DPA10301-DPB110501 DPA10301-DPB110601 DPA10301-DPB11101 DPA10301-DPB11301 DPA10301-DPB11801 DPA10301-DPB12301 DPA10301-DPB13901 DPA10301-DPB14001 DPA10301-DPB14901 DPA10301-DPB15501 DPA10301-DPB16501 DPA10301-DPB17501 DPA10301-DPB18001 DPA10401-DPB10101 DPA10401-DPB10201 DPA10401-DPB10202 DPA10401-DPB10402 DPA10401-DPB10501 DPA10401-DPB110501 DPA10401-DPB14901
KEPPFLWLGPELIPDKWTVQ

SEQ ID NO: 7565 - protein, 20 aa, synthetic construct
  source 1..20: note = Seed: KEPPFLWMGYELHPDKWTVQ; note = HLAs: DRB1_0101 DRB1_1001 DPA10103-DPB10202 DPA10103-DPB10401 DPA10103-DPB10501 DPA10103-DPB112601 DPA10103-DPB11501 DPA10103-DPB11801 DPA10103-DPB12301 DPA10103-DPB13401 DPA10103-DPB13901 DPA10103-DPB14001 DPA10103-DPB15501 DPA10104-DPB11501 DPA10105-DPB10401 DPA10105-DPB11801 DPA10106-DPB10101 DPA10201-DPB10101 DPA10201-DPB10401 DPA10201-DPB110601 DPA10201-DPB11501 DPA10201-DPB11601 DPA10201-DPB11901 DPA10202-DPB10101 DPA10202-DPB10501 DPA10202-DPB110601 DPA10202-DPB11801 DPA10202-DPB11901 DPA10202-DPB13101 DPA10202-DPB13801 DPA10202-DPB16501 DPA10301-DPB10101 DPA10301-DPB10202 DPA10301-DPB10401 DPA10301-DPB10402 DPA10301-DPB110501 DPA10301-DPB110601 DPA10301-DPB11801 DPA10301-DPB12301 DPA10301-DPB13901 DPA10301-DPB14001 DPA10301-DPB14901 DPA10301-DPB16501 DPA10301-DPB17501 DPA10301-DPB18001 DPA10401-DPB10201 DPA10401-DPB10402 DPA10401-DPB10501 DPA10401-DPB110501 DPA10401-DPB14901
KEPPLLWLGIELFPDKWTVQ

SEQ ID NO: 7566 - protein, 20 aa, synthetic construct
  source 1..20: note = Seed: KEPPFLWMGYELHPDKWTVQ; note = HLAs: DRB1_0101 DRB1_0405 DRB1_1001 DPA10103-DPB11501 DPA10103-DPB11801 DPA10103-DPB13401 DPA10103-DPB14001 DPA10103-DPB15901 DPA10104-DPB11501 DPA10105-DPB11801 DPA10106-DPB10101 DPA10201-DPB10101 DPA10201-DPB10201 DPA10201-DPB10202 DPA10201-DPB110601 DPA10201-DPB11501 DPA10201-DPB11901 DPA10202-DPB10101 DPA10202-DPB10201 DPA10202-DPB10202 DPA10202-DPB10401 DPA10202-DPB10501 DPA10202-DPB110601 DPA10202-DPB11101 DPA10202-DPB11301 DPA10202-DPB11801 DPA10202-DPB11901 DPA10202-DPB13101 DPA10202-DPB13801 DPA10202-DPB15501 DPA10202-DPB16501 DPA10301-DPB10201 DPA10301-DPB10202 DPA10301-DPB11801 DPA10301-DPB14001 DPA10301-DPB17501
KEPPILWIGSELLPDKWTVQ

SEQ ID NO: 7567 - protein, 20 aa, synthetic construct
  source 1..20: note = Seed: KEPPFLWMGYELHPDKWTVQ; note = HLAs: DPA10103-DPB10201 DPA10103-DPB10401 DPA10103-DPB10501 DPA10103-DPB112601 DPA10103-DPB11501 DPA10103-DPB11601 DPA10103-DPB11901 DPA10103-DPB12301 DPA10103-DPB13101 DPA10103-DPB13401 DPA10103-DPB13901 DPA10103-DPB14001 DPA10103-DPB14801 DPA10103-DPB15501 DPA10104-DPB11501 DPA10105-DPB10401 DPA10106-DPB10101 DPA10201-DPB10101 DPA10201-DPB10501 DPA10201-DPB110601 DPA10201-DPB11601 DPA10201-DPB11901 DPA10201-DPB13401 DPA10201-DPB15501 DPA10202-DPB10101 DPA10202-DPB10202 DPA10202-DPB10401 DPA10202-DPB10501 DPA10202-DPB110601 DPA10202-DPB11101 DPA10202-DPB11301 DPA10202-DPB11801 DPA10202-DPB11901 DPA10202-DPB13101 DPA10202-DPB13801 DPA10202-DPB15501 DPA10202-DPB16501 DPA10301-DPB10101 DPA10301-DPB110601 DPA10301-DPB11101 DPA10301-DPB14001 DPA10301-DPB16501 DPA10401-DPB10101 DPA10401-DPB10201 DPA10401-DPB10402 DPA10401-DPB110501 DPA10401-DPB14901
KEPPCLWVGFELFPDKWTVQ

SEQ ID NO: 7568 - protein, 14 aa, synthetic construct
  source 1..14: note = Seed: PPFLWMGYELHPDK; note = HLAs: DPA10103-DPB10101 DPA10103-DPB10201 DPA10103-DPB10202 DPA10103-DPB10401 DPA10103-DPB112601 DPA10103-DPB11501 DPA10103-DPB11601 DPA10103-DPB11901 DPA10103-DPB12301 DPA10103-DPB13101 DPA10103-DPB13401 DPA10103-DPB13901 DPA10103-DPB14001 DPA10103-DPB14101 DPA10103-DPB14801 DPA10103-DPB15001 DPA10103-DPB15901 DPA10104-DPB10101 DPA10104-DPB11501 DPA10105-DPB10101 DPA10105-DPB10401 DPA10105-DPB15001 DPA10106-DPB10101 DPA10201-DPB10101 DPA10201-DPB110601 DPA10201-DPB11501 DPA10201-DPB11601 DPA10201-DPB11901 DPA10202-DPB10101 DPA10202-DPB10201 DPA10202-DPB10202 DPA10202-DPB10401 DPA10202-DPB110601 DPA10202-DPB11901 DPA10202-DPB13101 DPA10202-DPB16501 DPA10301-DPB10101 DPA10301-DPB10201 DPA10301-DPB10202 DPA10301-DPB10401 DPA10301-DPB10402 DPA10301-DPB110501 DPA10301-DPB110601 DPA10301-DPB11801 DPA10301-DPB12301 DPA10301-DPB13901 DPA10301-DPB14001 DPA10301-DPB14901 DPA10301-DPB15501 DPA10301-DPB16501 DPA10301-DPB17501 DPA10301-DPB18001 DPA10401-DPB10101 DPA10401-DPB10201; note = HLAs: DPA10401-DPB10202 DPA10401-DPB10402 DPA10401-DPB10501 DPA10401-DPB110501 DPA10401-DPB14901
PPFLWKGFELCPDK

SEQ ID NO: 7569 - protein, 20 aa, synthetic construct
  source 1..20: note = Seed: KEPPFLWMGYELHPDKWTVQ; note = HLAs: DRB1_0101 DRB1_0405 DRB1_1001 DPA10103-DPB11501 DPA10103-DPB11801 DPA10103-DPB13401 DPA10104-DPB11501 DPA10105-DPB11801 DPA10201-DPB10201 DPA10201-DPB11501 DPA10202-DPB10101 DPA10202-DPB10201 DPA10202-DPB10202 DPA10202-DPB10401 DPA10202-DPB10501 DPA10202-DPB110601 DPA10202-DPB11101 DPA10202-DPB11801 DPA10202-DPB11901 DPA10202-DPB13101 DPA10202-DPB13801 DPA10202-DPB15501 DPA10202-DPB16501 DPA10301-DPB10202 DPA10301-DPB11801 DPA10301-DPB14001
KEPPLLWLGSELLPDKWTVQ

SEQ ID NO: 7570 - protein, 20 aa, synthetic construct
  source 1..20: note = Seed: KEPPFLWMGYELHPDKWTVQ; note = HLAs: DPA10103-DPB10202 DPA10103-DPB10501 DPA10103-DPB11801 DPA10103-DPB13401 DPA10103-DPB14001 DPA10105-DPB11801 DPA10106-DPB10101 DPA10201-DPB10101 DPA10201-DPB10202 DPA10201-DPB10501 DPA10201-DPB110601 DPA10201-DPB11601 DPA10201-DPB11901 DPA10201-DPB13401 DPA10202-DPB10101 DPA10202-DPB10501 DPA10202-DPB110601 DPA10202-DPB11801 DPA10202-DPB11901 DPA10202-DPB13801 DPA10301-DPB10101 DPA10301-DPB10202 DPA10301-DPB110601 DPA10301-DPB11801 DPA10301-DPB14001 DPA10301-DPB16501 DPA10401-DPB10202 DPA10401-DPB10402 DPA10401-DPB10501 DPA10401-DPB110501 DPA10401-DPB14901
KEPPMLWFGIELFPDKWTVQ

SEQ ID NO: 7571 - protein, 20 aa, synthetic construct
  source 1..20: note = Seed: KEPPFLWMGYELHPDKWTVQ; note = HLAs: DRB1_0101 DRB1_0405 DRB1_1001 DPA10103-DPB11801 DPA10103-DPB13401 DPA10105-DPB11801 DPA10201-DPB10201 DPA10201-DPB10202 DPA10201-DPB10401 DPA10201-DPB10501 DPA10201-DPB11501 DPA10201-DPB11601 DPA10201-DPB13401 DPA10202-DPB10101 DPA10202-DPB10201 DPA10202-DPB10202 DPA10202-DPB10401 DPA10202-DPB10501 DPA10202-DPB110601 DPA10202-DPB11101 DPA10202-DPB11301 DPA10202-DPB11801 DPA10202-DPB11901 DPA10202-DPB13101 DPA10202-DPB13801 DPA10202-DPB15501 DPA10202-DPB16501 DPA10301-DPB11801 DPA10301-DPB14001 DPA10401-DPB10402 DPA10401-DPB110501 DPA10401-DPB14901
KEPPYLWLGTELLPDKWTVQ

SEQ ID NO: 7572 - protein, 20 aa, synthetic construct
  source 1..20: note = Seed: KEPPFLWMGYELHPDKWTVQ; note = HLAs: DPA10103-DPB10101 DPA10103-DPB10201 DPA10103-DPB10202 DPA10103-DPB10401 DPA10103-DPB10501 DPA10103-DPB112601 DPA10103-DPB11501 DPA10103-DPB11601 DPA10103-DPB11801 DPA10103-DPB11901 DPA10103-DPB12301 DPA10103-DPB13101 DPA10103-DPB13401 DPA10103-DPB13901 DPA10103-DPB14001 DPA10103-DPB14101 DPA10103-DPB14801 DPA10103-DPB15001 DPA10103-DPB15501 DPA10103-DPB15901 DPA10104-DPB10101 DPA10104-DPB11501 DPA10105-DPB10101 DPA10105-DPB10401 DPA10105-DPB11801 DPA10105-DPB15001 DPA10106-DPB10101 DPA10201-DPB10101 DPA10201-DPB10201 DPA10201-DPB10202 DPA10201-DPB10401 DPA10201-DPB110601 DPA10201-DPB11501 DPA10201-DPB11601 DPA10201-DPB11901 DPA10201-DPB13401 DPA10201-DPB15501 DPA10202-DPB10101 DPA10202-DPB10201 DPA10202-DPB10202 DPA10202-DPB10401 DPA10202-DPB110601 DPA10202-DPB11101 DPA10202-DPB11301 DPA10202-DPB11801 DPA10202-DPB11901 DPA10202-DPB13101 DPA10202-DPB15501 DPA10202-DPB16501 DPA10301-DPB10101 DPA10301-DPB10201 DPA10301-DPB10202 DPA10301-DPB10401 DPA10301-DPB10402 DPA10301-DPB110501; note = HLAs: DPA10301-DPB110601 DPA10301-DPB11101 DPA10301-DPB11301 DPA10301-DPB11801 DPA10301-DPB12301 DPA10301-DPB13901 DPA10301-DPB14001 DPA10301-DPB14901 DPA10301-DPB15501 DPA10301-DPB16501 DPA10301-DPB17501 DPA10301-DPB18001 DPA10401-DPB10101 DPA10401-DPB10201 DPA10401-DPB10202 DPA10401-DPB10402 DPA10401-DPB10501 DPA10401-DPB110501 DPA10401-DPB14901
KEPPLLWWGYELVPDKWTVQ

SEQ ID NO: 7573 - protein, 20 aa, synthetic construct
  source 1..20: note = Seed: KEPPFLWMGYELHPDKWTVQ; note = HLAs: DRB1_0101 DPA10103-DPB10201 DPA10103-DPB10202 DPA10103-DPB11501 DPA10103-DPB11601 DPA10103-DPB11801 DPA10103-DPB11901 DPA10103-DPB13401 DPA10103-DPB14001 DPA10103-DPB14101 DPA10103-DPB14801 DPA10103-DPB15901 DPA10104-DPB11501 DPA10105-DPB11801 DPA10201-DPB10201 DPA10201-DPB10202 DPA10201-DPB110601 DPA10201-DPB11501 DPA10201-DPB11601 DPA10201-DPB11901 DPA10201-DPB13401 DPA10201-DPB15501 DPA10202-DPB10201 DPA10202-DPB10202 DPA10202-DPB10401 DPA10202-DPB10501 DPA10202-DPB110601 DPA10202-DPB11801 DPA10202-DPB11901 DPA10202-DPB13101 DPA10202-DPB13801 DPA10301-DPB10201 DPA10301-DPB10202 DPA10301-DPB10402 DPA10301-DPB110501 DPA10301-DPB110601 DPA10301-DPB11801 DPA10301-DPB14001 DPA10301-DPB14901 DPA10301-DPB15501 DPA10301-DPB17501 DPA10301-DPB18001 DPA10401-DPB10201 DPA10401-DPB10202 DPA10401-DPB10402 DPA10401-DPB10501 DPA10401-DPB110501 DPA10401-DPB14901
KEPPLLWHGVELLPDKWTVQ

SEQ ID NO: 7574 - protein, 20 aa, synthetic construct
  source 1..20: note = Seed: KEPPFLWMGYELHPDKWTVQ; note = HLAs: DRB1_0101 DRB1_0405 DRB1_1001 DPA10103-DPB11801 DPA10103-DPB13401 DPA10103-DPB15901 DPA10105-DPB11801 DPA10201-DPB10201 DPA10201-DPB10202 DPA10201-DPB10401 DPA10201-DPB11501 DPA10201-DPB11601 DPA10202-DPB10101 DPA10202-DPB10201 DPA10202-DPB10202 DPA10202-DPB10401 DPA10202-DPB10501 DPA10202-DPB110601 DPA10202-DPB11101 DPA10202-DPB11301 DPA10202-DPB11801 DPA10202-DPB11901 DPA10202-DPB13101 DPA10202-DPB13801 DPA10202-DPB15501 DPA10202-DPB16501 DPA10301-DPB10201 DPA10301-DPB10202 DPA10301-DPB10402 DPA10301-DPB110501 DPA10301-DPB11801 DPA10301-DPB14001 DPA10301-DPB14901 DPA10301-DPB18001 DPA10401-DPB10402 DPA10401-DPB110501 DPA10401-DPB14901
KEPPYLWMGTELLPDKWTVQ

SEQ ID NO: 7575 - protein, 20 aa, synthetic construct
  source 1..20: note = Seed: KEPPFLWMGYELHPDKWTVQ; note = HLAs: DRB1_0101 DRB1_0405 DRB1_1001 DPA10103-DPB10101 DPA10103-DPB10201 DPA10103-DPB10202 DPA10103-DPB10401 DPA10103-DPB10501 DPA10103-DPB112601 DPA10103-DPB11501 DPA10103-DPB11601 DPA10103-DPB11801 DPA10103-DPB11901 DPA10103-DPB12301 DPA10103-DPB13101 DPA10103-DPB13401 DPA10103-DPB13901 DPA10103-DPB14001 DPA10103-DPB14101 DPA10103-DPB14801 DPA10103-DPB15001 DPA10103-DPB15501 DPA10103-DPB15901 DPA10104-DPB10101 DPA10104-DPB11501 DPA10105-DPB10101 DPA10105-DPB10401 DPA10105-DPB11801 DPA10105-DPB15001 DPA10106-DPB10101 DPA10201-DPB10101 DPA10201-DPB110601 DPA10201-DPB11501 DPA10201-DPB11901 DPA10201-DPB15501 DPA10202-DPB10101 DPA10202-DPB10201 DPA10202-DPB10202 DPA10202-DPB10501 DPA10202-DPB110601 DPA10202-DPB11801 DPA10202-DPB11901 DPA10202-DPB13801 DPA10202-DPB15501 DPA10202-DPB16501 DPA10301-DPB10101 DPA10301-DPB10201 DPA10301-DPB10202 DPA10301-DPB10401 DPA10301-DPB10402 DPA10301-DPB110501 DPA10301-DPB110601 DPA10301-DPB11101 DPA10301-DPB11301 DPA10301-DPB11801 DPA10301-DPB12301; note = HLAs: DPA10301-DPB13901 DPA10301-DPB14001 DPA10301-DPB14901 DPA10301-DPB15501 DPA10301-DPB17501 DPA10301-DPB18001 DPA10401-DPB10101 DPA10401-DPB10201 DPA10401-DPB10202 DPA10401-DPB10402 DPA10401-DPB10501 DPA10401-DPB110501 DPA10401-DPB14901
KEPPFLWAGVELAPDKWTVQ

SEQ ID NO: 7576 - protein, 20 aa, synthetic construct
  source 1..20: note = Seed: KEPPFLWMGYELHPDKWTVQ; note = HLAs: DPA10103-DPB10201 DPA10103-DPB10202 DPA10103-DPB10401 DPA10103-DPB10501 DPA10103-DPB112601 DPA10103-DPB11501 DPA10103-DPB11601 DPA10103-DPB11801 DPA10103-DPB11901 DPA10103-DPB12301 DPA10103-DPB13101 DPA10103-DPB13401 DPA10103-DPB13901 DPA10103-DPB14001 DPA10103-DPB14101 DPA10103-DPB14801 DPA10103-DPB15501 DPA10103-DPB15901 DPA10104-DPB11501 DPA10105-DPB10401 DPA10105-DPB11801 DPA10106-DPB10101 DPA10201-DPB10101 DPA10201-DPB10201 DPA10201-DPB10202 DPA10201-DPB10401 DPA10201-DPB10501 DPA10201-DPB110601 DPA10201-DPB11501 DPA10201-DPB11601 DPA10201-DPB11901 DPA10201-DPB13401 DPA10201-DPB15501 DPA10202-DPB10101 DPA10202-DPB10201 DPA10202-DPB10202 DPA10202-DPB10401 DPA10202-DPB10501 DPA10202-DPB110601 DPA10202-DPB11101 DPA10202-DPB11301 DPA10202-DPB11901 DPA10202-DPB13101 DPA10202-DPB13801 DPA10202-DPB15501 DPA10202-DPB16501 DPA10301-DPB10101 DPA10301-DPB10202 DPA10301-DPB10401 DPA10301-DPB10402 DPA10301-DPB110501 DPA10301-DPB110601 DPA10301-DPB11101 DPA10301-DPB11301; note = HLAs: DPA10301-DPB11801 DPA10301-DPB12301 DPA10301-DPB13901 DPA10301-DPB14001 DPA10301-DPB14901 DPA10301-DPB16501 DPA10301-DPB17501 DPA10301-DPB18001 DPA10401-DPB10101 DPA10401-DPB10202 DPA10401-DPB10402 DPA10401-DPB10501 DPA10401-DPB110501 DPA10401-DPB14901
KEPPCLWLGFELMPDKWTVQ

SEQ ID NO: 7577 - protein, 20 aa, synthetic construct
  source 1..20: note = Seed: KEPPFLWMGYELHPDKWTVQ; note = HLAs: DPA10103-DPB10101 DPA10103-DPB10201 DPA10103-DPB10202 DPA10103-DPB10401 DPA10103-DPB10501 DPA10103-DPB112601 DPA10103-DPB11501 DPA10103-DPB11601 DPA10103-DPB11801 DPA10103-DPB11901 DPA10103-DPB12301 DPA10103-DPB13101 DPA10103-DPB13401 DPA10103-DPB13901 DPA10103-DPB14001 DPA10103-DPB14801 DPA10103-DPB15001 DPA10104-DPB10101 DPA10104-DPB11501 DPA10105-DPB10101 DPA10105-DPB10401 DPA10105-DPB11801 DPA10105-DPB15001 DPA10106-DPB10101 DPA10201-DPB10101 DPA10201-DPB10202 DPA10201-DPB10401 DPA10201-DPB110601 DPA10201-DPB11501 DPA10201-DPB11601 DPA10201-DPB11901 DPA10202-DPB10101 DPA10202-DPB10201 DPA10202-DPB10202 DPA10202-DPB10401 DPA10202-DPB10501 DPA10202-DPB110601 DPA10202-DPB11801 DPA10202-DPB11901 DPA10202-DPB13101 DPA10202-DPB13801 DPA10202-DPB15501 DPA10202-DPB16501 DPA10301-DPB10101 DPA10301-DPB10201 DPA10301-DPB10202 DPA10301-DPB10401 DPA10301-DPB10402 DPA10301-DPB110501 DPA10301-DPB110601 DPA10301-DPB11801 DPA10301-DPB12301 DPA10301-DPB13901 DPA10301-DPB14001; note = HLAs: DPA10301-DPB14901 DPA10301-DPB16501 DPA10301-DPB17501 DPA10301-DPB18001 DPA10401-DPB10101 DPA10401-DPB10201 DPA10401-DPB10202 DPA10401-DPB10402 DPA10401-DPB10501 DPA10401-DPB110501 DPA10401-DPB14901
KEPPMLWEGLELLPDKWTVQ

SEQ ID NO: 7578 - protein, 20 aa, synthetic construct
  source 1..20: note = Seed: KEPPFLWMGYELHPDKWTVQ; note = HLAs: DRB1_0101 DRB1_0405 DRB1_1001 DPA10103-DPB11501 DPA10103-DPB11801 DPA10103-DPB13401 DPA10103-DPB14001 DPA10104-DPB11501 DPA10105-DPB11801 DPA10106-DPB10101 DPA10201-DPB10101 DPA10201-DPB10202 DPA10201-DPB110601 DPA10201-DPB11501 DPA10201-DPB11901 DPA10202-DPB10101 DPA10202-DPB10201 DPA10202-DPB10202 DPA10202-DPB10401 DPA10202-DPB10501 DPA10202-DPB110601 DPA10202-DPB11101 DPA10202-DPB11301 DPA10202-DPB11801 DPA10202-DPB11901 DPA10202-DPB13101 DPA10202-DPB13801 DPA10202-DPB15501 DPA10202-DPB16501 DPA10301-DPB10201 DPA10301-DPB10202 DPA10301-DPB10402 DPA10301-DPB110501 DPA10301-DPB110601 DPA10301-DPB11101 DPA10301-DPB11801 DPA10301-DPB14001 DPA10301-DPB14901 DPA10301-DPB17501 DPA10301-DPB18001
KEPPILWMGSELLPDKWTVQ

SEQ ID NO: 7579 - protein, 20 aa, synthetic construct
  source 1..20: note = Seed: KEPPFLWMGYELHPDKWTVQ; note = HLAs: DRB1_0101 DRB1_0405 DRB1_1001 DPA10103-DPB10101 DPA10103-DPB10201 DPA10103-DPB10202 DPA10103-DPB10401 DPA10103-DPB10501 DPA10103-DPB112601 DPA10103-DPB11501 DPA10103-DPB11601 DPA10103-DPB11801 DPA10103-DPB11901 DPA10103-DPB12301 DPA10103-DPB13101 DPA10103-DPB13401 DPA10103-DPB13901 DPA10103-DPB14001 DPA10103-DPB14101 DPA10103-DPB14801 DPA10103-DPB15501 DPA10103-DPB15901 DPA10104-DPB10101 DPA10104-DPB11501 DPA10105-DPB10101 DPA10105-DPB10401 DPA10105-DPB11801 DPA10106-DPB10101 DPA10201-DPB10101 DPA10201-DPB10201 DPA10201-DPB10202 DPA10201-DPB110601 DPA10201-DPB11501 DPA10201-DPB11601 DPA10201-DPB11901 DPA10201-DPB15501 DPA10202-DPB10101 DPA10202-DPB10201 DPA10202-DPB10202 DPA10202-DPB10401 DPA10202-DPB10501 DPA10202-DPB110601 DPA10202-DPB11101 DPA10202-DPB11301 DPA10202-DPB11901 DPA10202-DPB13101 DPA10202-DPB13801 DPA10202-DPB15501 DPA10202-DPB16501 DPA10301-DPB10101 DPA10301-DPB10201 DPA10301-DPB10202 DPA10301-DPB10401 DPA10301-DPB10402 DPA10301-DPB110501 DPA10301-DPB110601; note = HLAs: DPA10301-DPB11101 DPA10301-DPB11301 DPA10301-DPB11801 DPA10301-DPB12301 DPA10301-DPB13901 DPA10301-DPB14001 DPA10301-DPB14901 DPA10301-DPB15501 DPA10301-DPB16501 DPA10301-DPB17501 DPA10301-DPB18001 DPA10401-DPB10201 DPA10401-DPB10202 DPA10401-DPB10402 DPA10401-DPB10501 DPA10401-DPB110501 DPA10401-DPB14901
KEPPFLWVGGELLPDKWTVQ

SEQ ID NO: 7580 - protein, 20 aa, synthetic construct
  source 1..20: note = Seed: KEPPFLWMGYELHPDKWTVQ; note = HLAs: DRB1_0101 DRB1_0405 DRB1_1001 DPA10103-DPB10401 DPA10103-DPB112601 DPA10103-DPB11501 DPA10103-DPB11801 DPA10103-DPB12301 DPA10103-DPB13401 DPA10103-DPB13901 DPA10103-DPB15901 DPA10104-DPB11501 DPA10105-DPB10401 DPA10105-DPB11801 DPA10106-DPB10101 DPA10201-DPB10101 DPA10201-DPB10202 DPA10201-DPB10401 DPA10201-DPB10501 DPA10201-DPB11501 DPA10201-DPB11601 DPA10201-DPB13401 DPA10202-DPB10101 DPA10202-DPB10201 DPA10202-DPB10202 DPA10202-DPB10401 DPA10202-DPB10501 DPA10202-DPB110601 DPA10202-DPB11101 DPA10202-DPB11801 DPA10202-DPB11901 DPA10202-DPB13101 DPA10202-DPB13801 DPA10202-DPB16501 DPA10301-DPB10201 DPA10301-DPB10202 DPA10301-DPB11801 DPA10301-DPB14001 DPA10401-DPB10202 DPA10401-DPB10402 DPA10401-DPB110501 DPA10401-DPB14901
KEPPFLWLGEELLPDKWTVQ

SEQ ID NO: 7581 - protein, 20 aa, synthetic construct
  source 1..20: note = Seed: KEPPFLWMGYELHPDKWTVQ; note = HLAs: DPA10103-DPB10101 DPA10103-DPB10201 DPA10103-DPB10202 DPA10103-DPB10401 DPA10103-DPB10501 DPA10103-DPB112601 DPA10103-DPB11501 DPA10103-DPB11601 DPA10103-DPB11801 DPA10103-DPB11901 DPA10103-DPB12301 DPA10103-DPB13101 DPA10103-DPB13401 DPA10103-DPB13901 DPA10103-DPB14001 DPA10103-DPB14101 DPA10103-DPB14801 DPA10103-DPB15001 DPA10103-DPB15901 DPA10104-DPB10101 DPA10104-DPB11501 DPA10105-DPB10101 DPA10105-DPB10401 DPA10105-DPB11801 DPA10105-DPB15001 DPA10106-DPB10101 DPA10201-DPB10101 DPA10201-DPB10202 DPA10201-DPB110601 DPA10201-DPB11501 DPA10201-DPB11601 DPA10201-DPB11901 DPA10202-DPB10101 DPA10202-DPB10201 DPA10202-DPB10202 DPA10202-DPB10401 DPA10202-DPB10501 DPA10202-DPB110601 DPA10202-DPB11301 DPA10202-DPB11801 DPA10202-DPB11901 DPA10202-DPB13101 DPA10202-DPB13801 DPA10202-DPB15501 DPA10202-DPB16501 DPA10301-DPB10101 DPA10301-DPB10201 DPA10301-DPB10202 DPA10301-DPB10401 DPA10301-DPB10402 DPA10301-DPB110501 DPA10301-DPB110601 DPA10301-DPB11101 DPA10301-DPB11301; note = HLAs: DPA10301-DPB11801 DPA10301-DPB12301 DPA10301-DPB13901 DPA10301-DPB14001 DPA10301-DPB14901 DPA10301-DPB15501 DPA10301-DPB16501 DPA10301-DPB17501 DPA10301-DPB18001 DPA10401-DPB10101 DPA10401-DPB10201 DPA10401-DPB10202 DPA10401-DPB10402 DPA10401-DPB10501 DPA10401-DPB110501 DPA10401-DPB14901
KEPPLLWTGLELTPDKWTVQ

SEQ ID NO: 7582 - protein, 20 aa, synthetic construct
  source 1..20: note = Seed: KEPPFLWMGYELHPDKWTVQ; note = HLAs: DPA10103-DPB10101 DPA10103-DPB10201 DPA10103-DPB10202 DPA10103-DPB10401 DPA10103-DPB112601 DPA10103-DPB11501 DPA10103-DPB11601 DPA10103-DPB11801 DPA10103-DPB11901 DPA10103-DPB12301 DPA10103-DPB13101 DPA10103-DPB13401 DPA10103-DPB13901 DPA10103-DPB14001 DPA10103-DPB14101 DPA10103-DPB14801 DPA10103-DPB15001 DPA10103-DPB15501 DPA10103-DPB15901 DPA10104-DPB10101 DPA10104-DPB11501 DPA10105-DPB10101 DPA10105-DPB10401 DPA10105-DPB11801 DPA10105-DPB15001 DPA10106-DPB10101 DPA10201-DPB10101 DPA10201-DPB10201 DPA10201-DPB10202 DPA10201-DPB110601 DPA10201-DPB11501 DPA10201-DPB11601 DPA10201-DPB11901 DPA10201-DPB13401 DPA10201-DPB15501 DPA10202-DPB10101 DPA10202-DPB10201 DPA10202-DPB10202 DPA10202-DPB10401 DPA10202-DPB110601 DPA10202-DPB11301 DPA10202-DPB11801 DPA10202-DPB11901 DPA10202-DPB13101 DPA10202-DPB15501 DPA10202-DPB16501 DPA10301-DPB10101 DPA10301-DPB10201 DPA10301-DPB10202 DPA10301-DPB10401 DPA10301-DPB10402 DPA10301-DPB110501 DPA10301-DPB110601 DPA10301-DPB11801; note = HLAs: DPA10301-DPB12301 DPA10301-DPB13901 DPA10301-DPB14001 DPA10301-DPB14901 DPA10301-DPB16501 DPA10301-DPB17501 DPA10301-DPB18001 DPA10401-DPB10101 DPA10401-DPB10201 DPA10401-DPB10202 DPA10401-DPB10501
KEPPVLWHGYELIPDKWTVQ

SEQ ID NO: 7583 - protein, 20 aa, synthetic construct
  source 1..20: note = Seed: KEPPFLWMGYELHPDKWTVQ; note = HLAs: DRB1_0101 DRB1_0405 DRB1_1001 DPA10103-DPB10401 DPA10103-DPB10501 DPA10103-DPB112601 DPA10103-DPB11501 DPA10103-DPB11901 DPA10103-DPB12301 DPA10103-DPB13401 DPA10103-DPB13901 DPA10103-DPB14001 DPA10103-DPB14101 DPA10103-DPB15001 DPA10104-DPB11501 DPA10105-DPB10401 DPA10105-DPB15001 DPA10106-DPB10101 DPA10201-DPB10101 DPA10201-DPB110601 DPA10201-DPB11501 DPA10201-DPB11901 DPA10201-DPB15501 DPA10202-DPB10101 DPA10202-DPB10202 DPA10202-DPB10501 DPA10202-DPB11101 DPA10202-DPB13101 DPA10202-DPB13801 DPA10202-DPB16501 DPA10301-DPB10101 DPA10301-DPB10201 DPA10301-DPB10202 DPA10301-DPB10401 DPA10301-DPB10402 DPA10301-DPB110501 DPA10301-DPB110601 DPA10301-DPB11101 DPA10301-DPB11301 DPA10301-DPB11801 DPA10301-DPB12301 DPA10301-DPB13901 DPA10301-DPB14001 DPA10301-DPB14901 DPA10301-DPB15501 DPA10301-DPB16501 DPA10301-DPB17501 DPA10301-DPB18001 DPA10401-DPB10501
KEPPFLWLGVELEPDKWTVQ

SEQ ID NO: 7584 - protein, 20 aa, synthetic construct
  source 1..20: note = Seed: KEPPFLWMGYELHPDKWTVQ; note = HLAs: DRB1_0101 DRB1_0405 DRB1_1001 DPA10103-DPB10101 DPA10103-DPB10201 DPA10103-DPB10202 DPA10103-DPB10401 DPA10103-DPB10501 DPA10103-DPB112601 DPA10103-DPB11501 DPA10103-DPB11601 DPA10103-DPB11901 DPA10103-DPB12301 DPA10103-DPB13101 DPA10103-DPB13401 DPA10103-DPB13901 DPA10103-DPB14001 DPA10103-DPB14101 DPA10103-DPB14801 DPA10103-DPB15001 DPA10103-DPB15501 DPA10104-DPB10101 DPA10104-DPB11501 DPA10105-DPB10101 DPA10105-DPB10401 DPA10105-DPB15001 DPA10106-DPB10101 DPA10201-DPB10101 DPA10201-DPB110601 DPA10201-DPB11501 DPA10201-DPB11601 DPA10201-DPB11901 DPA10201-DPB15501 DPA10202-DPB10101 DPA10202-DPB10201 DPA10202-DPB10202 DPA10202-DPB10401 DPA10202-DPB10501 DPA10202-DPB110601 DPA10202-DPB11101 DPA10202-DPB11301 DPA10202-DPB11901 DPA10202-DPB13101 DPA10202-DPB13801 DPA10202-DPB15501 DPA10202-DPB16501 DPA10301-DPB10101 DPA10301-DPB10201 DPA10301-DPB10202 DPA10301-DPB10401 DPA10301-DPB10402 DPA10301-DPB110501 DPA10301-DPB110601 DPA10301-DPB11101 DPA10301-DPB11301 DPA10301-DPB11801; note = HLAs: DPA10301-DPB12301 DPA10301-DPB13901 DPA10301-DPB14001 DPA10301-DPB14901 DPA10301-DPB15501 DPA10301-DPB16501 DPA10301-DPB17501 DPA10301-DPB18001 DPA10401-DPB10101 DPA10401-DPB10201 DPA10401-DPB10202 DPA10401-DPB10402 DPA10401-DPB10501 DPA10401-DPB110501 DPA10401-DPB14901
KEPPFLWIGIELDPDKWTVQ

SEQ ID NO: 7585 - protein, 14 aa, synthetic construct
  source 1..14: note = Seed: PPFLWMGYELHPDK; note = HLAs: DPA10103-DPB10101 DPA10103-DPB10201 DPA10103-DPB10202 DPA10103-DPB10401 DPA10103-DPB112601 DPA10103-DPB11501 DPA10103-DPB11601 DPA10103-DPB11901 DPA10103-DPB12301 DPA10103-DPB13101 DPA10103-DPB13401 DPA10103-DPB13901 DPA10103-DPB14001 DPA10103-DPB14101 DPA10103-DPB14801 DPA10103-DPB15001 DPA10103-DPB15901 DPA10104-DPB10101 DPA10104-DPB11501 DPA10105-DPB10101 DPA10105-DPB10401 DPA10105-DPB15001 DPA10106-DPB10101 DPA10201-DPB10101 DPA10201-DPB110601 DPA10201-DPB11501 DPA10201-DPB11601 DPA10201-DPB11901 DPA10202-DPB10101 DPA10202-DPB10201 DPA10202-DPB10202 DPA10202-DPB110601 DPA10202-DPB11901 DPA10202-DPB13101 DPA10202-DPB16501 DPA10301-DPB10101 DPA10301-DPB10201 DPA10301-DPB10202 DPA10301-DPB10401 DPA10301-DPB10402 DPA10301-DPB110501 DPA10301-DPB110601 DPA10301-DPB11801 DPA10301-DPB12301 DPA10301-DPB13901 DPA10301-DPB14001 DPA10301-DPB14901 DPA10301-DPB16501 DPA10301-DPB18001 DPA10401-DPB10101 DPA10401-DPB10201 DPA10401-DPB10202 DPA10401-DPB10402 DPA10401-DPB110501; note = HLAs: DPA10401-DPB14901
PPYLWKGFELTPDK

SEQ ID NO: 7586 - protein, 20 aa, synthetic construct
  source 1..20: note = Seed: KEPPFLWMGYELHPDKWTVQ; note = HLAs: DRB1_0101 DRB1_1001 DPA10103-DPB11501 DPA10103-DPB11801 DPA10103-DPB13401 DPA10104-DPB11501 DPA10105-DPB11801 DPA10106-DPB10101 DPA10201-DPB10101 DPA10201-DPB110601 DPA10201-DPB11501 DPA10201-DPB11601 DPA10201-DPB11901 DPA10202-DPB110601 DPA10202-DPB11801 DPA10202-DPB11901 DPA10301-DPB11801 DPA10301-DPB14001 DPA10401-DPB10402 DPA10401-DPB110501 DPA10401-DPB14901
KEPPVLWLGIELLPDKWTVQ

SEQ ID NO: 7587 - protein, 20 aa, synthetic construct
  source 1..20: note = Seed: KEPPFLWMGYELHPDKWTVQ; note = HLAs: DRB1_0101 DRB1_0405 DRB1_1001 DPA10103-DPB10101 DPA10103-DPB10201 DPA10103-DPB10401 DPA10103-DPB10501 DPA10103-DPB112601 DPA10103-DPB11501 DPA10103-DPB11601 DPA10103-DPB11801 DPA10103-DPB12301 DPA10103-DPB13401 DPA10103-DPB13901 DPA10103-DPB14001 DPA10103-DPB14801 DPA10104-DPB10101 DPA10104-DPB11501 DPA10105-DPB10101 DPA10105-DPB10401 DPA10105-DPB11801 DPA10106-DPB10101 DPA10201-DPB10101 DPA10201-DPB10201 DPA10201-DPB10202 DPA10201-DPB10401 DPA10201-DPB110601 DPA10201-DPB11501 DPA10201-DPB11601 DPA10201-DPB11901 DPA10202-DPB10101 DPA10202-DPB10201 DPA10202-DPB10202 DPA10202-DPB10401 DPA10202-DPB10501 DPA10202-DPB110601 DPA10202-DPB11101 DPA10202-DPB11801 DPA10202-DPB11901 DPA10202-DPB13101 DPA10202-DPB13801 DPA10202-DPB15501 DPA10202-DPB16501 DPA10301-DPB10101 DPA10301-DPB10201 DPA10301-DPB10202 DPA10301-DPB10401 DPA10301-DPB10402 DPA10301-DPB110501 DPA10301-DPB110601 DPA10301-DPB11101 DPA10301-DPB11301 DPA10301-DPB11801 DPA10301-DPB12301 DPA10301-DPB13901 DPA10301-DPB14001; note = HLAs: DPA10301-DPB14901 DPA10301-DPB15501 DPA10301-DPB16501 DPA10301-DPB17501 DPA10301-DPB18001 DPA10401-DPB10201 DPA10401-DPB10402 DPA10401-DPB10501 DPA10401-DPB110501 DPA10401-DPB14901
KEPPFLWMGSELFPDKWTVQ

SEQ ID NO: 7588 - protein, 20 aa, synthetic construct
  source 1..20: note = Seed: KEPPFLWMGYELHPDKWTVQ; note = HLAs: DRB1_0101 DPA10103-DPB10201 DPA10103-DPB10202 DPA10103-DPB10401 DPA10103-DPB10501 DPA10103-DPB112601 DPA10103-DPB11501 DPA10103-DPB11801 DPA10103-DPB12301 DPA10103-DPB13401 DPA10103-DPB13901 DPA10103-DPB14001 DPA10103-DPB14101 DPA10103-DPB14801 DPA10104-DPB11501 DPA10105-DPB10401 DPA10105-DPB11801 DPA10106-DPB10101 DPA10201-DPB10101 DPA10201-DPB110601 DPA10201-DPB11501 DPA10201-DPB11601 DPA10201-DPB11901 DPA10202-DPB10501 DPA10202-DPB110601 DPA10202-DPB11801 DPA10202-DPB11901 DPA10202-DPB13801 DPA10301-DPB10201 DPA10301-DPB10202 DPA10301-DPB10401 DPA10301-DPB10402 DPA10301-DPB110501 DPA10301-DPB110601 DPA10301-DPB11801 DPA10301-DPB12301 DPA10301-DPB13901 DPA10301-DPB14001 DPA10301-DPB14901 DPA10301-DPB16501 DPA10301-DPB17501 DPA10301-DPB18001 DPA10401-DPB10202
KEPPVLWMGLELLPDKWTVQ

SEQ ID NO: 7589 - protein, 20 aa, synthetic construct
  source 1..20: note = Seed: KEPPFLWMGYELHPDKWTVQ; note = HLAs: DRB1_0101 DRB1_0405 DRB1_1001 DPA10103-DPB10101 DPA10103-DPB10201 DPA10103-DPB10202 DPA10103-DPB10401 DPA10103-DPB10501 DPA10103-DPB112601 DPA10103-DPB11501 DPA10103-DPB11601 DPA10103-DPB11801 DPA10103-DPB11901 DPA10103-DPB12301 DPA10103-DPB13101 DPA10103-DPB13401 DPA10103-DPB13901 DPA10103-DPB14001 DPA10103-DPB14101 DPA10103-DPB14801 DPA10103-DPB15001 DPA10103-DPB15501 DPA10103-DPB15901 DPA10104-DPB10101 DPA10104-DPB11501 DPA10105-DPB10101 DPA10105-DPB10401 DPA10105-DPB11801 DPA10105-DPB15001 DPA10106-DPB10101 DPA10201-DPB10101 DPA10201-DPB10202 DPA10201-DPB10401 DPA10201-DPB110601 DPA10201-DPB11501 DPA10201-DPB11601 DPA10201-DPB11901 DPA10201-DPB15501 DPA10202-DPB10101 DPA10202-DPB10201 DPA10202-DPB10202 DPA10202-DPB10401 DPA10202-DPB10501 DPA10202-DPB110601 DPA10202-DPB11101 DPA10202-DPB11301 DPA10202-DPB11801 DPA10202-DPB11901 DPA10202-DPB13101 DPA10202-DPB13801 DPA10202-DPB15501 DPA10202-DPB16501 DPA10301-DPB10101 DPA10301-DPB10201 DPA10301-DPB10202 DPA10301-DPB10401; note = HLAs: DPA10301-DPB10402 DPA10301-DPB110501 DPA10301-DPB110601 DPA10301-DPB11101 DPA10301-DPB11301 DPA10301-DPB11801 DPA10301-DPB12301 DPA10301-DPB13901 DPA10301-DPB14001 DPA10301-DPB14901 DPA10301-DPB15501 DPA10301-DPB16501 DPA10301-DPB17501 DPA10301-DPB18001 DPA10401-DPB10201 DPA10401-DPB10202 DPA10401-DPB10402 DPA10401-DPB10501 DPA10401-DPB110501 DPA10401-DPB14901
KEPPYLWLGAELFPDKWTVQ

SEQ ID NO: 7590 - protein, 20 aa, synthetic construct
  source 1..20: note = Seed: KEPPFLWMGYELHPDKWTVQ; note = HLAs: DRB1_0101 DRB1_1001 DPA10103-DPB10201 DPA10103-DPB10202 DPA10103-DPB10401 DPA10103-DPB112601 DPA10103-DPB11501 DPA10103-DPB11601 DPA10103-DPB11801 DPA10103-DPB11901 DPA10103-DPB12301 DPA10103-DPB13401 DPA10103-DPB13901 DPA10103-DPB14001 DPA10103-DPB14801 DPA10103-DPB15001 DPA10103-DPB15501 DPA10104-DPB11501 DPA10105-DPB10401 DPA10105-DPB11801 DPA10105-DPB15001 DPA10106-DPB10101 DPA10201-DPB10101 DPA10201-DPB110601 DPA10201-DPB11501 DPA10201-DPB11601 DPA10201-DPB11901 DPA10202-DPB10101 DPA10202-DPB10201 DPA10202-DPB10202 DPA10202-DPB10501 DPA10202-DPB110601 DPA10202-DPB11801 DPA10202-DPB11901 DPA10202-DPB13801 DPA10202-DPB16501 DPA10301-DPB10101 DPA10301-DPB10201 DPA10301-DPB10202 DPA10301-DPB10401 DPA10301-DPB10402 DPA10301-DPB110501 DPA10301-DPB110601 DPA10301-DPB11101 DPA10301-DPB11301 DPA10301-DPB11801 DPA10301-DPB12301 DPA10301-DPB13901 DPA10301-DPB14001 DPA10301-DPB14901 DPA10301-DPB15501 DPA10301-DPB16501 DPA10301-DPB17501 DPA10301-DPB18001 DPA10401-DPB10101; note = HLAs: DPA10401-DPB10201 DPA10401-DPB10202 DPA10401-DPB10402 DPA10401-DPB10501 DPA10401-DPB110501 DPA10401-DPB14901
KEPPLLWIGIELAPDKWTVQ

SEQ ID NO: 7591 - protein, 20 aa, synthetic construct
  source 1..20: note = Seed: KEPPFLWMGYELHPDKWTVQ; note = HLAs: DRB1_0101 DRB1_0405 DRB1_1001 DPA10103-DPB10101 DPA10103-DPB10201 DPA10103-DPB10202 DPA10103-DPB10401 DPA10103-DPB10501 DPA10103-DPB112601 DPA10103-DPB11501 DPA10103-DPB11601 DPA10103-DPB11801 DPA10103-DPB11901 DPA10103-DPB12301 DPA10103-DPB13101 DPA10103-DPB13401 DPA10103-DPB13901 DPA10103-DPB14001 DPA10103-DPB14101 DPA10103-DPB14801 DPA10103-DPB15001 DPA10103-DPB15501 DPA10103-DPB15901 DPA10104-DPB10101 DPA10104-DPB11501 DPA10105-DPB10101 DPA10105-DPB10401 DPA10105-DPB11801 DPA10105-DPB15001 DPA10106-DPB10101 DPA10201-DPB10101 DPA10201-DPB10201 DPA10201-DPB10202 DPA10201-DPB10401 DPA10201-DPB10501 DPA10201-DPB110601 DPA10201-DPB11501 DPA10201-DPB11601 DPA10201-DPB11901 DPA10201-DPB13401 DPA10201-DPB15501 DPA10202-DPB10101 DPA10202-DPB10201 DPA10202-DPB10202 DPA10202-DPB10401 DPA10202-DPB10501 DPA10202-DPB110601 DPA10202-DPB11101 DPA10202-DPB11301 DPA10202-DPB11801 DPA10202-DPB11901 DPA10202-DPB13101 DPA10202-DPB13801 DPA10202-DPB15501 DPA10202-DPB16501 DPA10301-DPB10101; note = HLAs: DPA10301-DPB10201 DPA10301-DPB10202 DPA10301-DPB10401 DPA10301-DPB10402 DPA10301-DPB110501 DPA10301-DPB110601 DPA10301-DPB11101 DPA10301-DPB11301 DPA10301-DPB11801 DPA10301-DPB12301 DPA10301-DPB13901 DPA10301-DPB14001 DPA10301-DPB14901 DPA10301-DPB15501 DPA10301-DPB16501 DPA10301-DPB17501 DPA10301-DPB18001 DPA10401-DPB10101 DPA10401-DPB10201 DPA10401-DPB10202 DPA10401-DPB10402 DPA10401-DPB10501 DPA10401-DPB110501 DPA10401-DPB14901
KEPPFLWMGAELYPDKWTVQ

SEQ ID NO: 7592 - protein, 20 aa, synthetic construct
  source 1..20: note = Seed: KEPPFLWMGYELHPDKWTVQ; note = HLAs: DRB1_0101 DRB1_0405 DRB1_1001 DPA10103-DPB10401 DPA10103-DPB10501 DPA10103-DPB112601 DPA10103-DPB11501 DPA10103-DPB11801 DPA10103-DPB12301 DPA10103-DPB13401 DPA10103-DPB13901 DPA10103-DPB14001 DPA10103-DPB15901 DPA10104-DPB11501 DPA10105-DPB10401 DPA10105-DPB11801 DPA10106-DPB10101 DPA10201-DPB10101 DPA10201-DPB110601 DPA10201-DPB11501 DPA10201-DPB11601 DPA10201-DPB11901 DPA10202-DPB10101 DPA10202-DPB10202 DPA10202-DPB10401 DPA10202-DPB10501 DPA10202-DPB110601 DPA10202-DPB11101 DPA10202-DPB11301 DPA10202-DPB11801 DPA10202-DPB11901 DPA10202-DPB13101 DPA10202-DPB13801 DPA10202-DPB15501 DPA10202-DPB16501 DPA10301-DPB10201 DPA10301-DPB10202 DPA10301-DPB10401 DPA10301-DPB10402 DPA10301-DPB110501 DPA10301-DPB110601 DPA10301-DPB11101 DPA10301-DPB11801 DPA10301-DPB12301 DPA10301-DPB13901 DPA10301-DPB14001 DPA10301-DPB14901 DPA10301-DPB15501 DPA10301-DPB17501 DPA10301-DPB18001 DPA10401-DPB10202 DPA10401-DPB10402 DPA10401-DPB10501 DPA10401-DPB110501 DPA10401-DPB14901
KEPPFLWMGTELMPDKWTVQ

SEQ ID NO: 7593 - protein, 20 aa, synthetic construct
  source 1..20: note = Seed: KEPPFLWMGYELHPDKWTVQ; note = HLAs: DRB1_0101 DRB1_0405 DRB1_1001 DPA10103-DPB10101 DPA10103-DPB10201 DPA10103-DPB10202 DPA10103-DPB10401 DPA10103-DPB112601 DPA10103-DPB11501 DPA10103-DPB11601 DPA10103-DPB11901 DPA10103-DPB12301 DPA10103-DPB13101 DPA10103-DPB13401 DPA10103-DPB13901 DPA10103-DPB14001 DPA10103-DPB14101 DPA10103-DPB14801 DPA10103-DPB15001 DPA10103-DPB15501 DPA10103-DPB15901 DPA10104-DPB10101 DPA10104-DPB11501 DPA10105-DPB10101 DPA10105-DPB10401 DPA10105-DPB15001 DPA10106-DPB10101 DPA10201-DPB10101 DPA10201-DPB10201 DPA10201-DPB10202 DPA10201-DPB110601 DPA10201-DPB11501 DPA10201-DPB11601 DPA10201-DPB11901 DPA10201-DPB15501 DPA10202-DPB10101 DPA10202-DPB10201 DPA10202-DPB10202 DPA10202-DPB10401 DPA10202-DPB10501 DPA10202-DPB110601 DPA10202-DPB11101 DPA10202-DPB11301 DPA10202-DPB11901 DPA10202-DPB13101 DPA10202-DPB13801 DPA10202-DPB15501 DPA10202-DPB16501 DPA10301-DPB10101 DPA10301-DPB10201 DPA10301-DPB10202 DPA10301-DPB10401 DPA10301-DPB10402 DPA10301-DPB110501 DPA10301-DPB110601 DPA10301-DPB11101; note = HLAs: DPA10301-DPB11301 DPA10301-DPB11801 DPA10301-DPB12301 DPA10301-DPB13901 DPA10301-DPB14001 DPA10301-DPB14901 DPA10301-DPB15501 DPA10301-DPB16501 DPA10301-DPB17501 DPA10301-DPB18001 DPA10401-DPB10101 DPA10401-DPB10201 DPA10401-DPB10202 DPA10401-DPB10402 DPA10401-DPB10501 DPA10401-DPB110501 DPA10401-DPB14901
KEPPYLWTGAELVPDKWTVQ

SEQ ID NO: 7594 - protein, 20 aa, synthetic construct
  source 1..20: note = Seed: KEPPFLWMGYELHPDKWTVQ; note = HLAs: DPA10103-DPB10101 DPA10103-DPB10201 DPA10103-DPB10202 DPA10103-DPB10401 DPA10103-DPB10402 DPA10103-DPB10501 DPA10103-DPB110501 DPA10103-DPB112601 DPA10103-DPB11501 DPA10103-DPB11601 DPA10103-DPB11801 DPA10103-DPB11901 DPA10103-DPB12301 DPA10103-DPB13101 DPA10103-DPB13401 DPA10103-DPB13901 DPA10103-DPB14001 DPA10103-DPB14101 DPA10103-DPB14801 DPA10103-DPB14901 DPA10103-DPB15001 DPA10103-DPB15101 DPA10103-DPB15501 DPA10103-DPB15901 DPA10103-DPB18001 DPA10104-DPB10101 DPA10104-DPB11501 DPA10105-DPB10101 DPA10105-DPB10401 DPA10105-DPB11801 DPA10105-DPB15001 DPA10106-DPB10101 DPA10201-DPB10101 DPA10201-DPB10201 DPA10201-DPB10202 DPA10201-DPB110601 DPA10201-DPB11501 DPA10201-DPB11601 DPA10201-DPB11901 DPA10202-DPB10101 DPA10202-DPB10201 DPA10202-DPB10202 DPA10202-DPB10401 DPA10202-DPB10501 DPA10202-DPB110601 DPA10202-DPB11301 DPA10202-DPB11801 DPA10202-DPB11901 DPA10202-DPB13101 DPA10202-DPB13801 DPA10202-DPB15501 DPA10202-DPB16501 DPA10301-DPB10101 DPA10301-DPB10201 DPA10301-DPB10202; note = HLAs: DPA10301-DPB10401 DPA10301-DPB10402 DPA10301-DPB110501 DPA10301-DPB110601 DPA10301-DPB11101 DPA10301-DPB11801 DPA10301-DPB12301 DPA10301-DPB13901 DPA10301-DPB14001 DPA10301-DPB14901 DPA10301-DPB15501 DPA10301-DPB16501 DPA10301-DPB17501 DPA10301-DPB18001 DPA10401-DPB10101 DPA10401-DPB10201 DPA10401-DPB10202 DPA10401-DPB10402 DPA10401-DPB10501 DPA10401-DPB110501 DPA10401-DPB14901
KEPPMLWNGFELSPDKWTVQ

SEQ ID NO: 7595 - protein, 14 aa, synthetic construct
  source 1..14: note = Seed: PPFLWMGYELHPDK; note = HLAs: DPA10103-DPB10101 DPA10103-DPB10201 DPA10103-DPB10202 DPA10103-DPB10401 DPA10103-DPB112601 DPA10103-DPB11501 DPA10103-DPB11601 DPA10103-DPB11901 DPA10103-DPB12301 DPA10103-DPB13101 DPA10103-DPB13401 DPA10103-DPB13901 DPA10103-DPB14001 DPA10103-DPB14101 DPA10103-DPB14801 DPA10103-DPB15001 DPA10103-DPB15901 DPA10104-DPB10101 DPA10104-DPB11501 DPA10105-DPB10101 DPA10105-DPB10401 DPA10105-DPB15001 DPA10106-DPB10101 DPA10201-DPB10101 DPA10201-DPB110601 DPA10201-DPB11501 DPA10201-DPB11601 DPA10201-DPB11901 DPA10202-DPB10101 DPA10202-DPB10201 DPA10202-DPB10202 DPA10202-DPB110601 DPA10202-DPB11901 DPA10202-DPB13101 DPA10202-DPB16501 DPA10301-DPB10101 DPA10301-DPB10201 DPA10301-DPB10202 DPA10301-DPB10401 DPA10301-DPB10402 DPA10301-DPB110501 DPA10301-DPB110601 DPA10301-DPB11801 DPA10301-DPB12301 DPA10301-DPB13901 DPA10301-DPB14001 DPA10301-DPB14901 DPA10301-DPB16501 DPA10301-DPB17501 DPA10301-DPB18001 DPA10401-DPB10101 DPA10401-DPB10201 DPA10401-DPB10202 DPA10401-DPB10402; note = HLAs: DPA10401-DPB110501 DPA10401-DPB14901
PPWLWHGFELCPDK

SEQ ID NO: 7596 - protein, 20 aa, synthetic construct
  source 1..20: note = Seed: KEPPFLWMGYELHPDKWTVQ; note = HLAs: DRB1_0101 DRB1_0405 DRB1_1001 DPA10103-DPB10101 DPA10103-DPB10201 DPA10103-DPB10202 DPA10103-DPB10401 DPA10103-DPB10501 DPA10103-DPB112601 DPA10103-DPB11501 DPA10103-DPB11601 DPA10103-DPB11801 DPA10103-DPB11901 DPA10103-DPB12301 DPA10103-DPB13101 DPA10103-DPB13401 DPA10103-DPB13901 DPA10103-DPB14001 DPA10103-DPB14801 DPA10103-DPB15501 DPA10104-DPB10101 DPA10104-DPB11501 DPA10105-DPB10101 DPA10105-DPB10401 DPA10105-DPB11801 DPA10106-DPB10101 DPA10201-DPB10101 DPA10201-DPB110601 DPA10201-DPB11501 DPA10201-DPB11601 DPA10201-DPB11901 DPA10201-DPB15501 DPA10202-DPB10101 DPA10202-DPB10201 DPA10202-DPB10202 DPA10202-DPB10401 DPA10202-DPB10501 DPA10202-DPB110601 DPA10202-DPB11101 DPA10202-DPB11301 DPA10202-DPB11801 DPA10202-DPB11901 DPA10202-DPB13101 DPA10202-DPB13801 DPA10202-DPB15501 DPA10202-DPB16501 DPA10301-DPB10101 DPA10301-DPB10201 DPA10301-DPB10202 DPA10301-DPB10401 DPA10301-DPB10402 DPA10301-DPB110501 DPA10301-DPB110601 DPA10301-DPB11101 DPA10301-DPB11301 DPA10301-DPB11801; note = HLAs: DPA10301-DPB12301 DPA10301-DPB13901 DPA10301-DPB14001 DPA10301-DPB14901 DPA10301-DPB15501 DPA10301-DPB16501 DPA10301-DPB17501 DPA10301-DPB18001 DPA10401-DPB10201 DPA10401-DPB10202 DPA10401-DPB10402 DPA10401-DPB10501 DPA10401-DPB110501 DPA10401-DPB14901
KEPPILWLGAELIPDKWTVQ

SEQ ID NO: 7597 - protein, 20 aa, synthetic construct
  source 1..20: note = Seed: KEPPFLWMGYELHPDKWTVQ; note = HLAs: DPA10103-DPB10101 DPA10103-DPB10201 DPA10103-DPB10202 DPA10103-DPB10401 DPA10103-DPB112601 DPA10103-DPB11501 DPA10103-DPB11601 DPA10103-DPB11801 DPA10103-DPB11901 DPA10103-DPB12301 DPA10103-DPB13101 DPA10103-DPB13401 DPA10103-DPB13901 DPA10103-DPB14001 DPA10103-DPB14101 DPA10103-DPB14801 DPA10103-DPB15001 DPA10104-DPB10101 DPA10104-DPB11501 DPA10105-DPB10101 DPA10105-DPB10401 DPA10105-DPB11801 DPA10105-DPB15001 DPA10106-DPB10101 DPA10201-DPB10101 DPA10201-DPB10201 DPA10201-DPB10202 DPA10201-DPB10401 DPA10201-DPB110601 DPA10201-DPB11501 DPA10201-DPB11601 DPA10201-DPB11901 DPA10202-DPB10101 DPA10202-DPB10201 DPA10202-DPB10202 DPA10202-DPB10401 DPA10202-DPB110601 DPA10202-DPB11901 DPA10202-DPB13101 DPA10202-DPB15501 DPA10202-DPB16501 DPA10301-DPB10101 DPA10301-DPB10201 DPA10301-DPB10202 DPA10301-DPB10401 DPA10301-DPB10402 DPA10301-DPB110501 DPA10301-DPB110601 DPA10301-DPB11301 DPA10301-DPB11801 DPA10301-DPB12301 DPA10301-DPB13901 DPA10301-DPB14001 DPA10301-DPB14901; note = HLAs: DPA10301-DPB15501 DPA10301-DPB16501 DPA10301-DPB17501 DPA10301-DPB18001 DPA10401-DPB10101 DPA10401-DPB10201 DPA10401-DPB10202 DPA10401-DPB10501
KEPPWLWSGFELWPDKWTVQ

SEQ ID NO: 7598 - protein, 20 aa, synthetic construct
  source 1..20: note = Seed: KEPPFLWMGYELHPDKWTVQ; note = HLAs: DRB1_0101 DRB1_1001 DPA10103-DPB10101 DPA10103-DPB10201 DPA10103-DPB10202 DPA10103-DPB10401 DPA10103-DPB10501 DPA10103-DPB112601 DPA10103-DPB11501 DPA10103-DPB11601 DPA10103-DPB11801 DPA10103-DPB11901 DPA10103-DPB12301 DPA10103-DPB13101 DPA10103-DPB13401 DPA10103-DPB13901 DPA10103-DPB14001 DPA10103-DPB14801 DPA10103-DPB15001 DPA10104-DPB10101 DPA10104-DPB11501 DPA10105-DPB10101 DPA10105-DPB10401 DPA10105-DPB11801 DPA10105-DPB15001 DPA10106-DPB10101 DPA10201-DPB10101 DPA10201-DPB110601 DPA10201-DPB11501 DPA10201-DPB11601 DPA10201-DPB11901 DPA10202-DPB10101 DPA10202-DPB10201 DPA10202-DPB10202 DPA10202-DPB10501 DPA10202-DPB110601 DPA10202-DPB11801 DPA10202-DPB11901 DPA10202-DPB13101 DPA10202-DPB13801 DPA10202-DPB15501 DPA10202-DPB16501 DPA10301-DPB10101 DPA10301-DPB10201 DPA10301-DPB10202 DPA10301-DPB10401 DPA10301-DPB10402 DPA10301-DPB110501 DPA10301-DPB110601 DPA10301-DPB11101 DPA10301-DPB11301 DPA10301-DPB11801 DPA10301-DPB12301 DPA10301-DPB13901 DPA10301-DPB14001; note = HLAs: DPA10301-DPB14901 DPA10301-DPB15501 DPA10301-DPB16501 DPA10301-DPB17501 DPA10301-DPB18001 DPA10401-DPB10101 DPA10401-DPB10201 DPA10401-DPB10202 DPA10401-DPB10402 DPA10401-DPB10501 DPA10401-DPB110501 DPA10401-DPB14901
KEPPLLWIGLELSPDKWTVQ

SEQ ID NO: 7599 - protein, 20 aa, synthetic construct
  source 1..20: note = Seed: KEPPFLWMGYELHPDKWTVQ; note = HLAs: DRB1_0101 DRB1_0405 DRB1_1001 DPA10103-DPB10201 DPA10103-DPB10202 DPA10103-DPB10401 DPA10103-DPB10501 DPA10103-DPB112601 DPA10103-DPB11501 DPA10103-DPB11601 DPA10103-DPB11801 DPA10103-DPB11901 DPA10103-DPB12301 DPA10103-DPB13401 DPA10103-DPB13901 DPA10103-DPB14001 DPA10103-DPB14801 DPA10103-DPB15501 DPA10104-DPB11501 DPA10105-DPB10401 DPA10105-DPB11801 DPA10106-DPB10101 DPA10201-DPB10101 DPA10201-DPB110601 DPA10201-DPB11501 DPA10201-DPB11901 DPA10201-DPB15501 DPA10202-DPB10101 DPA10202-DPB10201 DPA10202-DPB10202 DPA10202-DPB10401 DPA10202-DPB10501 DPA10202-DPB110601 DPA10202-DPB11101 DPA10202-DPB11301 DPA10202-DPB11801 DPA10202-DPB11901 DPA10202-DPB13101 DPA10202-DPB13801 DPA10202-DPB15501 DPA10202-DPB16501 DPA10301-DPB10101 DPA10301-DPB10201 DPA10301-DPB10202 DPA10301-DPB10401 DPA10301-DPB10402 DPA10301-DPB110501 DPA10301-DPB110601 DPA10301-DPB11101 DPA10301-DPB11301 DPA10301-DPB11801 DPA10301-DPB12301 DPA10301-DPB13901 DPA10301-DPB14001 DPA10301-DPB14901 DPA10301-DPB15501; note = HLAs: DPA10301-DPB16501 DPA10301-DPB17501 DPA10301-DPB18001 DPA10401-DPB10201 DPA10401-DPB10202 DPA10401-DPB10402 DPA10401-DPB10501 DPA10401-DPB110501 DPA10401-DPB14901
KEPPILWLGAELMPDKWTVQ

SEQ ID NO: 7600 - protein, 20 aa, synthetic construct
  source 1..20: note = Seed: KEPPFLWMGYELHPDKWTVQ; note = HLAs: DRB1_0101 DRB1_0405 DRB1_1001 DPA10103-DPB10101 DPA10103-DPB10201 DPA10103-DPB10202 DPA10103-DPB10401 DPA10103-DPB112601 DPA10103-DPB11501 DPA10103-DPB11601 DPA10103-DPB11901 DPA10103-DPB12301 DPA10103-DPB13101 DPA10103-DPB13401 DPA10103-DPB13901 DPA10103-DPB14001 DPA10103-DPB14801 DPA10103-DPB15001 DPA10103-DPB15501 DPA10104-DPB10101 DPA10104-DPB11501 DPA10105-DPB10101 DPA10105-DPB10401 DPA10105-DPB15001 DPA10106-DPB10101 DPA10201-DPB10101 DPA10201-DPB11501 DPA10202-DPB10101 DPA10202-DPB10202 DPA10202-DPB110601 DPA10202-DPB11101 DPA10202-DPB11301 DPA10202-DPB11901 DPA10202-DPB13101 DPA10202-DPB15501 DPA10202-DPB16501 DPA10301-DPB10101 DPA10301-DPB10201 DPA10301-DPB10202 DPA10301-DPB10401 DPA10301-DPB10402 DPA10301-DPB110501 DPA10301-DPB110601 DPA10301-DPB11101 DPA10301-DPB11301 DPA10301-DPB11801 DPA10301-DPB12301 DPA10301-DPB13901 DPA10301-DPB14001 DPA10301-DPB14901 DPA10301-DPB15501 DPA10301-DPB16501 DPA10301-DPB17501 DPA10301-DPB18001 DPA10401-DPB10101 DPA10401-DPB10201; note = HLAs: DPA10401-DPB10202 DPA10401-DPB10501
KEPPFLWIGVELDPDKWTVQ

SEQ ID NO: 7601 - protein, 20 aa, synthetic construct
  source 1..20: note = Seed: KEPPFLWMGYELHPDKWTVQ; note = HLAs: DPA10202-DPB11801 DPA10301-DPB11801 DPA10401-DPB10402 DPA10401-DPB110501 DPA10401-DPB14901
KEPPVLWVGIELLPDKWTVQ

SEQ ID NO: 7602 - protein, 768 aa, synthetic construct
MRVTAPRTLILLLSGALALTETWAGSGGSGGGGSGGTANDIQKLLGGSGGGGSGGTYNDIQKLLGGSGGGGSGGWVVNDIQKVGGSGGGGSGGWSVNDIQKWGGSGGGGSGGTLNDIQKLLGGSGGGGSGGAMLDTGADDTLGGSGGGGSGGTMNDIQKLVGGSGGGGSGGKEPPFLWMGNELIPDKWTVQGGSGGGGSGGPPFLIMGFEDHPLKGGSGGGGSGGVSDSQYALGGSGGGGSGGKEPIFLYMNYEAHPDKWTVQGGSGGGGSGGKEPPFLWIGSELAPDKWTVQGGSGGGGSGGKEPPFLIMGFEDHPAKWTVQGGSGGGGSGGTANDIQKLFGGSGGGGSGGYTVLPQGWKGGSGGGGSGGTANDIQKLMGGSGGGGSGGKEPPFLIMGFEIHPDKWTVQGGSGGGGSGGTLNDIQKLVGGSGGGGSGGTYNDIQKLVGRGGSGGGGSGGKEPPFLIMGFEDHPVKWTVQGGSGGGGSGGTVNDIQKLVGRGGSGGGGSGGKEPPFLWTGFELLPDKWTVQGGSGGGGSGGVWDSQYALGGSGGGGSGGVYDSQYALGGSGGGGSGGTVNDIQKLVGKGGSGGGGSGGDVQKLVGKYGGSGGGGSGGVFDSQYALGGSGGGGSGGKEPPFLWHGFELLPDKWTVQGGSGGGGSGGVADSQYALGGSGGGGSGGKEPPFLWSGFELVPDKWTVQGGSLGGGGSGIVGIVAGLAVLAVVVIGAVVATVMCRRKSSGGKGGSYSQAASSDSAQGSDVSLTA
